(19) United States
(12) Patent Application Publication
(10) Pub. No.: US 2025/0319200 A1
(43) Pub. Date: Oct. 16, 2025

(54) ADENOVIRAL GENE THERAPY VECTORS

(71) Applicant: Ensoma, Inc., Boston, MA (US)

(72) Inventors: Ashvin Reddy Bashyam, Cambridge, MA (US); Soumitra Roy, Townsend, DE (US); Robert Thomas Peters, Needham, MA (US); Kush M. Parmar, Brookline, MA (US)

(21) Appl. No.: 18/554,883

(22) PCT Filed: Apr. 15, 2022
(86) PCT No.: PCT/US2022/025081

§ 371 Date: Oct. 11, 2023

Related U.S. Application Data
(60) Provisional application No. 63/175,249, filed on Apr. 15, 2021.

(51) Int. Cl. A61K 48/00; A61K 31/155; A61K 31/522; A61K 45/06; C07K 14/005; C12N 15/86

(52) U.S. Cl. CPC A61K 48/0041; A61K 31/155; A61K 31/522; A61K 45/06; C07K 14/005; C12N 15/86; C12N 2710/10022; C12N 2710/10043

(57) ABSTRACT

The present disclosure includes adenoviral vectors characterized by efficient transduction of hematopoietic cells (e.g., one or more particular types of hematopoietic cells), e.g., for in vivo or ex vivo gene therapy. The present disclosure includes, among other things, Ad3, Ad5, Ad7, Ad11, Ad14, Ad16, Ad21, Ad34, Ad35, Ad37, and Ad50 vectors and genomes. Ad3, Ad5, Ad7, Ad11, Ad14, Ad16, Ad21, Ad34, Ad35, Ad37, and Ad50 vectors and genomes of the present disclosure can include therapeutic payloads.

### PRIORITY APPLICATION

[0001] The present application is a National Stage of International Application No. PCT/US2022/025081, filed Apr. 15, 2022, which claims the benefit of U.S. Provisional Patent Application No. 63/175,249, filed Apr. 15, 2021, the content of each of which is hereby incorporated by reference herein in its entirety.

### SEQUENCE LISTING

[0002] The instant application contains a Sequence Listing, which has been submitted electronically as a .txt file named “2013585-0129_SL.txt”. The .txt file was created on Aug. 4, 2022 and is 1,595,680 bytes in size. The entire contents of the Sequence Listing are herein incorporated by reference.

### BACKGROUND

[0003] Many medical conditions are caused by genetic mutation and/or are treatable, at least in part, by gene therapy. Some conditions are particularly treatable by modification of hematopoietic cells. Compositions and methods that target hematopoietic cells for gene therapy are therefore needed.

### SUMMARY

[0004] Gene therapy can treat many conditions that have a genetic component, including without limitation hemoglobinopathies, immune deficiencies, and cancers. In various gene therapies, hematopoietic cells are an important target. However, current methods and compositions for modifying hematopoietic cells are limited. For instance, there is a need to identify vectors that selectively target hematopoietic cells (e.g., one or more particular types of hematopoietic cells). The present disclosure includes the recognition that certain adenoviral vectors selectively target hematopoietic cells (e.g., one or more particular types of hematopoietic cells).

[0005] The present disclosure includes, among other things, adenoviral vectors that selectively target hematopoietic cells of various types provided herein. The present disclosure includes, among other things, adenoviral vectors that selectively target hematopoietic stem cells (HSCs, e.g., CD34⁺ long-term (LT)-HSCs and/or CD34⁺ short-term (ST)-HSCs), common lymphoid progenitors (CLPs), T cells, NK cells, colony forming unit (CFU)-pre B cells, B cells, common myeloid progenitors (CMPs), granulocyte-macrophage progenitors (GMPs), CFU-M cells, monoblasts, monocytes, macrophages, CFU-G cells, myeloblasts, granulocytes, neutrophils, eosinophils, basophils, megakaryocyte-erythrocyte progenitors (MEPs), BFU-E cells, CFU-E cells, erythroblasts, erythrocytes, CFU-Mk cells, megakaryocytes, and/or platelets. The present disclosure includes, among other things, adenoviral vectors that selectively target CD34⁺ hematopoietic cells.

[0006] The present disclosure includes, among other things, Ad3, 5, 7, 11, 14, 16, 21, 34, 35, 37, or 50 vectors and Ad3, 5, 7, 11, 14, 16, 21, 34, 35, 37, or 50 genomes (e.g., “recombinant” or “engineered” adenoviral vectors and adenoviral genomes) that selectively target one or more hematopoietic cell types. Ad3, 5, 7, 11, 14, 16, 21, 34, 35, 37, or 50 vectors and genomes of the present disclosure can include various payloads. In various embodiments, a payload can include one or more of a nucleic acid sequence encoding a CRISPR system, base editing system, prime editing system, or other expression product. The present disclosure includes, among other things, combination adenoviral vectors and adenoviral genomes that include nucleic acid sequences encoding a plurality of expression products that together contribute to treatment of a disease or condition. The present disclosure includes, among other things, Ad3, 5, 7, 11, 14, 16, 21, 34, 35, 37, or 50 adenoviral vectors and Ad3, 5, 7, 11, 14, 16, 21, 34, 35, 37, or 50 adenoviral genomes for integration of a nucleic acid payload into a target cell genome. The present disclosure includes, among other things, Ad3, 5, 7, 11, 14, 16, 21, 34, 35, 37, or 50 donor vectors, Ad3, 5, 7, 11, 14, 16, 21, 34, 35, 37, or 50 adenoviral donor genomes, helper dependent Ad3, 5, 7, 11, 14, 16, 21, 34, 35, 37, or 50 adenoviral donor vectors, helper dependent Ad3, 5, 7, 11, 14, 16, 21, 34, 35, 37, or 50 adenoviral donor genomes, support vectors, support genomes, Ad3, 5, 7, 11, 14, 16, 21, 34, 35, 37, or 50 helper vectors, and Ad3, 5, 7, 11, 14, 16, 21, 34, 35, 37, or 50 helper genomes. For avoidance of doubt, a list of serotypes such as “Ad3, 5, 7, 11, 14, 16, 21, 34, 35, 37, or 50” can alternatively be written as “Ad3, Ad5, Ad7, Ad1, Ad14, Ad16, Ad21, Ad34, Ad35, Ad37, or Ad50.”

[0007] In at least one aspect, the present disclosure provides method of selectively targeting a hematopoietic cell type, the method including administering to a subject or system an adenoviral vector, where the adenoviral vector includes: (a) a capsid including one or more viral polypeptides of an Ad3, Ad5, Ad7, Ad11, Ad14, Ad16, Ad21, Ad34, Ad35, Ad37, or Ad50 serotype, where the one or more viral polypeptides include one or more of a: (i) fiber knob; (ii) fiber shaft; (iii) fiber tail; (iv) penton; and (v) hexon; and (b) a double-stranded DNA genome including a heterologous nucleic acid payload. In various embodiments, the genome further includes: (a) a 3′ ITR and a 5′ ITR, where each of the 3′ ITR and the 5′ ITR are of the viral polypeptide serotype; and (b) a packaging sequence, where the packing sequence is of the viral polypeptide serotype.

[0008] In various embodiments, the hematopoietic cell type is or includes a terminally differentiated cell type. In various embodiments, the hematopoietic cell type is or includes a progenitor cell type. In various embodiments, the hematopoietic cell type is or includes HSCs, common lymphoid progenitors (CLPs), T cells, NK cells, colony forming unit (CFU)-pre B cells, B cells, common myeloid progenitors (CMPs), granulocyte-macrophage progenitors (GMPs), CFU-M cells, monoblasts, monocytes, macrophages, CFU-G cells, myeloblasts, granulocytes, neutrophils, eosinophils, basophils, megakaryocyte-erythrocyte progenitors (MEPs), BFU-E cells, CFU-E cells, erythroblasts, erythrocytes, CFU-Mk cells, megakaryocytes, and/or platelets, optionally where the HSCs are CD34⁺ long-term hematopoietic stem cells (LT-HSCs) and/or CD34⁺ short-term (ST)-HSCs.

[0009] In various embodiments, the method is a method of in vivo gene therapy. In various embodiments, the hematopoietic cell type is a mammalian hematopoietic cell type, optionally where the mammalian hematopoietic cell type is a human hematopoietic cell type. In various embodiments, the subject is a mammalian subject, optionally where the mammalian subject is a human subject. In various embodiments, the method includes mobilization of hematopoietic cells of the subject prior to administration of the adenoviral vector. In various embodiments, the method includes administering one or more immunosuppression agents to the subject, optionally where the administration of the one or more immunosuppression agents is prior to the administration of the adenoviral vector.

[0010] In various embodiments, the method is a method of ex vivo gene therapy. In various embodiments, the hematopoietic cell type is a mammalian hematopoietic cell type, optionally where the mammalian hematopoietic cell type is a human hematopoietic cell type. In various embodiments, the system is or includes a biological sample derived from a mammalian donor, optionally where the mammalian donor is a human donor. In various embodiments, the heterologous nucleic acid payload includes a selectable marker, optionally where the selectable marker is MGMT^{P140K}. In various embodiments, the method includes administering a selecting agent to the subject, optionally where the selecting agent includes O⁶BG and/or BCNU.

[0011] In various embodiments, the one or more viral polypeptides include the: (a) fiber knob and fiber shaft; (b) fiber knob and fiber tail; (c) fiber knob and penton; (d) fiber knob and hexon; (e) fiber knob, hexon, and penton; (f) fiber shaft and fiber tail; (g) fiber shaft and penton; (h) fiber shaft and hexon; (i) fiber shaft, hexon, and penton; (j) fiber tail and penton; (k) fiber tail and hexon; (l) fiber tail, hexon, and penton; (m) fiber knob, fiber shaft, and fiber tail; (n) fiber knob, fiber shaft, and penton; (o) fiber knob, fiber shaft, and hexon; (p) fiber knob, fiber shaft, hexon, and penton; (q) fiber knob, fiber shaft, fiber tail, and penton; (r) fiber knob, fiber shaft, fiber tail, penton, and hexon; or (s) penton and hexon. In various embodiments, the fiber knob has a sequence that has at least 80% identity to a sequence selected from SEQ ID NOs: 15, 33, 51, 69, 87, 105, 123, 141, 159, 177, and 195. In various embodiments, the fiber shaft has a sequence that has at least 80% identity to a sequence selected from SEQ ID NOs: 14, 32, 50, 68, 86, 104, 122, 140, 158, 176, and 194. In various embodiments, the fiber tail has a sequence that has at least 80% identity to a sequence selected from SEQ ID NOs: 18, 36, 54, 72, 90, 108, 126, 144, 162, 180, and 198. In various embodiments, the penton has a sequence that has at least 80% identity to a sequence selected from SEQ ID NOs: 16, 34, 52, 70, 88, 106, 124, 142, 160, 178, and 196. In various embodiments, the hexon has a sequence that has at least 80% identity to a sequence selected from SEQ ID NOs: 17, 35, 53, 71, 89, 107, 125, 143, 161, 179, and 197. In various embodiments, the adenoviral vector includes a fiber of the serotype of the viral peptides. In various embodiments, the fiber has a sequence that has at least 80% identity to a sequence selected from SEQ ID NOs: 13, 31, 49, 67, 85, 103, 121, 139, 157, 175, and 193. In various embodiments, the adenoviral vector is a chimeric vector characterized in that the capsid includes at least one of a fiber knob, fiber shaft, fiber tail, hexon, or penton that is not of the serotype of the viral peptides. In various embodiments, the adenoviral vector is a helper dependent vector.

[0012] In various embodiments, the heterologous nucleic acid payload encodes a protein. In various embodiments, the heterologous nucleic acid payload encodes a chimeric antigen receptor (CAR), T cell receptor (TCR), antibody, or small RNA, optionally where the small RNA is an shRNA. In various embodiments, the heterologous nucleic acid payload encodes a chimeric antigen receptor (CAR) or T cell receptor (TCR) and the hematopoietic cell type is or includes T cells. In various embodiments, the heterologous nucleic acid payload encodes an antibody and the hematopoietic cell type is or includes B cells. In various embodiments, the heterologous nucleic acid payload encodes a gene editing enzyme or system, where the gene editing is selected from CRISPR editing, base editing, prime editing, and zinc finger nuclease editing.

[0013] In various embodiments, the heterologous nucleic acid payload encodes an agent for treatment of a condition selected from adenosine deaminase deficiency (ADA), adrenoleukodystrophy (ALD), agammaglobulinemia, alpha-1 antitrypsin deficiency, congenital amegakaryocytic thrombocytopenia, amyotrophic lateral sclerosis (Lou Gehrig's disease), ataxia telangiectasia, Batten disease, Bernard-Soulier Syndrome, CD40/CD40L deficiency, chronic granulomatous disease, common variable immune deficiency (CVID), congenital thrombotic thrombocytopenic purpura (cTTP), cystic fibrosis, Diamond Blackfan anemia (DBA), DOCK 8 deficiency, dyskeratosis congenital, Fabry disease, Factor V Deficiency, Factor VII Deficiency, Factor X Deficiency, Factor XI Deficiency, Factor XII Deficiency, Factor XIII Deficiency, familial apolipoprotein E deficiency and atherosclerosis (ApoE), familial erythrophagocytic lymphohistiocytosis, Fanconi anemia (FA), Friedreich ataxia, Gaucher disease, Glanzmann thrombasthenia, glucosemia, glycogen storage disease, glycogen storage disease type I (GSDI), Gray Platelet Syndrome, hemophilia, hemophilia A, hemophilia B, hereditary hemochromatosis, Hurler's syndrome, hyper IgM, Hypogammaglobulinemia, Krabbe disease, major histocompatibility complex class II deficiency (MHC-II), maple syrup urine disease, metachromatic leukodystrophy (MLD), mucopolysaccharidoses, mucopolysaccharidosis type I (MPS I), MPS II (Hunter Syndrome), MPS III (Sanfilippo syndrome), MPS IV (Morquio syndrome), MPS V, MPS VI (Maroteaux-Lamy syndrome), MPS VII (sly syndrome), muscular dystrophy, Niemann-Pick disease, Parkinson's disease, paroxysmal nocturnal hemoglobinuria (PNH), pernicious anemia, phenylketonuria (PKU), Pompe disease, pulmonary alveolar proteinosis (PAP), pure red cell aplasia (PRCA), pyruvate kinase deficiency, refractory anemia, Shwachman-Diamond syndrome, selective IgA deficiency, severe aplastic anemia, severe combined immunodeficiency disease (SCID), Severe combined immunodeficiency due to adenosine deaminase deficiency (ADA-SCID), sickle cell anemia, sickle cell disease, sickle cell trait, Tay Sachs, thalassemia, thalassemia intermedia, von Gierke disease, von Willebrand Disease, Wiskott-Aldrich syndrome (WAS), X-linked agammaglobulinemia (XLA), X-linked severe combined immunodeficiency (SCID-X1), Zellweger syndrome, α-mannosidosis, β-mannosidosis, β-thalassemia, and/or β-thalassemia major.

[0014] In various embodiments, the capsid includes one or more viral polypeptides of an Ad5, Ad7, Ad11, Ad16, Ad34, or Ad35 serotype, and the hematopoietic cell type is or includes monocytes. In various embodiments, the capsid includes one or more viral polypeptides of an Ad11, Ad16, Ad34, or Ad35 serotype, and the hematopoietic cell type is or includes monocytes. In various embodiments, the capsid includes one or more viral polypeptides of an Ad11, Ad34, or Ad35 serotype, and the hematopoietic cell type is or includes monocytes. In various embodiments, the monocytes are CD11+/CD14+ monocytes.

[0015] In various embodiments, the capsid includes one or more viral polypeptides of an Ad5, Ad7, Ad11, Ad16, Ad34, or Ad35 serotype, and the hematopoietic cell type is or includes T cells. In various embodiments, the capsid includes one or more viral polypeptides of an Ad5, Ad16, Ad34, or Ad35 serotype, and the hematopoietic cell type is or includes T cells. In various embodiments, the capsid includes one or more viral polypeptides of an Ad34 or Ad35 serotype, and the hematopoietic cell type is or includes T cells. In various embodiments, the T cells are CD3+ T cells.

[0016] In various embodiments, the capsid includes one or more viral polypeptides of an Ad5, Ad7, Ad11, Ad16, Ad34, or Ad35 serotype, and the hematopoietic cell type is or includes NK cells. In various embodiments, the capsid includes one or more viral polypeptides of an Ad11, Ad16, Ad34 or Ad35 serotype, and the hematopoietic cell type is or includes NK cells. In various embodiments, the capsid includes one or more viral polypeptides of an Ad11, Ad34, or Ad35 serotype, and the hematopoietic cell type is or includes NK cells. In various embodiments, the NK cells are CD3−/CD56+ NK cells.

[0017] In various embodiments, the capsid includes one or more viral polypeptides of an Ad5, Ad7, Ad11, Ad16, Ad34, or Ad35 serotype, and the hematopoietic cell type is or includes B cells. In various embodiments, the capsid includes one or more viral polypeptides of an Ad16 serotype, and the hematopoietic cell type is or includes B cells. In various embodiments, the B cells are CD20+ B cells.

[0018] In at least one aspect, the present disclosure provides a hematopoietic cell including an adenoviral vector and an adenoviral vector genome, where the adenoviral vector includes a capsid includes one or more viral polypeptides of an Ad3, Ad5, Ad7, Ad11, Ad14, Ad16, Ad21, Ad34, Ad35, Ad37, or Ad50 serotype, the one or more viral polypeptides including one or more of a: (i) fiber knob; (ii) fiber shaft; (iii) fiber tail; (iv) penton; and (v) hexon, where the adenoviral vector genome includes a double-stranded DNA genome including a heterologous nucleic acid payload, and where the hematopoietic cell is an HSC, common lymphoid progenitors (CLPs), T cell, NK cell, colony forming unit (CFU)-pre B cell, B cell, common myeloid progenitor (CMP) cell, granulocyte-macrophage progenitor (GMP) cell, CFU-M cell, monoblasts, monocyte, macrophage, CFU-G cell, myeloblast, granulocyte, neutrophil, eosinophil, basophil, megakaryocyte-erythrocyte progenitor (MEP) cell, BFU-E cell, CFU-E cell, erythroblast, erythrocyte, CFU-Mk cell, megakaryocyte, and/or platelet, optionally where the HSC cell is a CD34⁺ long-term hematopoietic stem cell (LT-HSC) and/or CD34⁺ short term (ST)-HSC.

[0019] In at least one aspect, the present disclosure provides a hematopoietic cell including an adenoviral vector genome, where the adenoviral vector genome includes (a) a 3′ ITR and a 5′ ITR, where the 3′ ITR and the 5′ ITR are each of the same serotype selected from Ad3, Ad5, Ad7, Ad11, Ad14, Ad16, Ad21, Ad34, Ad35, Ad37, and Ad50; (b) a packaging sequence, where the packing sequence is of the same serotype as the 3′ ITR and a 5′ ITR; and (c) a heterologous nucleic acid payload, and where the hematopoietic cell is an HSC, common lymphoid progenitors (CLPs), T cell, NK cell, colony forming unit (CFU)-pre B cell, B cell, common myeloid progenitor (CMP) cell, granulocyte-macrophage progenitor (GMP) cell, CFU-M cell, monoblasts, monocyte, macrophage, CFU-G cell, myeloblast, granulocyte, neutrophil, eosinophil, basophil, megakaryocyte-erythrocyte progenitor (MEP) cell, BFU-E cell, CFU-E cell, erythroblast, erythrocyte, CFU-Mk cell, megakaryocyte, and/or platelet, optionally where the HSC cell is a CD34⁺ long-term hematopoietic stem cell (LT-HSC) and/or CD34⁺ short-term (ST)-HSC. In various embodiments, the cell is a cell of a subject suffering from a condition selected from adenosine deaminase deficiency (ADA), adrenoleukodystrophy (ALD), agammaglobulinemia, alpha-1 antitrypsin deficiency, congenital amegakaryocytic thrombocytopenia, amyotrophic lateral sclerosis (Lou Gehrig's disease), ataxia telangiectasia, Batten disease, Bernard-Soulier Syndrome, CD40/CD40L deficiency, chronic granulomatous disease, common variable immune deficiency (CVID), congenital thrombotic thrombocytopenic purpura (cTTP), cystic fibrosis, Diamond Blackfan anemia (DBA), DOCK 8 deficiency, dyskeratosis congenital, Fabry disease, Factor V Deficiency, Factor VII Deficiency, Factor X Deficiency, Factor XI Deficiency, Factor XII Deficiency, Factor XIII Deficiency, familial apolipoprotein E deficiency and atherosclerosis (ApoE), familial erythrophagocytic lymphohistiocytosis, Fanconi anemia (FA), Friedreich ataxia, Gaucher disease, Glanzmann thrombasthenia, glucosemia, glycogen storage disease, glycogen storage disease type I (GSDI), Gray Platelet Syndrome, hemophilia, hemophilia A, hemophilia B, hereditary hemochromatosis, Hurler's syndrome, hyper IgM, Hypogammaglobulinemia, Krabbe disease, major histocompatibility complex class II deficiency (MHC-II), maple syrup urine disease, metachromatic leukodystrophy (MLD), mucopolysaccharidoses, mucopolysaccharidosis type I (MPS I), MPS II (Hunter Syndrome), MPS III (Sanfilippo syndrome), MPS IV (Morquio syndrome), MPS V, MPS VI (Maroteaux-Lamy syndrome), MPS VII (sly syndrome), muscular dystrophy, Niemann-Pick disease, Parkinson's disease, paroxysmal nocturnal hemoglobinuria (PNH), pernicious anemia, phenylketonuria (PKU), Pompe disease, pulmonary alveolar proteinosis (PAP), pure red cell aplasia (PRCA), pyruvate kinase deficiency, refractory anemia, Shwachman-Diamond syndrome, selective IgA deficiency, severe aplastic anemia, severe combined immunodeficiency disease (SCID), Severe combined immunodeficiency due to adenosine deaminase deficiency (ADA-SCID), sickle cell anemia, sickle cell disease, sickle cell trait, Tay Sachs, thalassemia, thalassemia intermedia, von Gierke disease, von Willebrand Disease, Wiskott-Aldrich syndrome (WAS), X-linked agammaglobulinemia (XLA), X-linked severe combined immunodeficiency (SCID-X1), Zellweger syndrome, α-mannosidosis, β-mannosidosis, β-thalassemia, and/or β-thalassemia major.

[0020] In at least one aspect, the present disclosure provides a method of in vivo gene therapy in a mammalian subject, the method including administering to the subject an adenoviral vector, where the adenoviral vector includes: (a) a capsid including one or more viral polypeptides of an Ad3, Ad7, Ad11, Ad14, Ad16, Ad21, Ad34, Ad37, or Ad50 serotype, where the one or more viral polypeptides include one or more of a: (i) fiber knob; (ii) fiber shaft; (iii) fiber tail; (iv) penton; and (v) hexon; and (b) a double-stranded DNA genome including a heterologous nucleic acid payload. In various embodiments, the genome further includes: (a) a 3′ ITR and a 5′ ITR, where each of the 3′ ITR and the 5′ ITR are of the viral polypeptide serotype; and (b) a packaging sequence, where the packing sequence is of the viral polypeptide serotype. In various embodiments, the method includes mobilization of hematopoietic stem cells of the subject prior to administration of the adenoviral vector. In various embodiments, the heterologous nucleic acid payload includes a selectable marker, optionally where the selectable marker is MGMT^{P140K}. In various embodiments, the method includes administering a selecting agent to the subject, optionally where the selecting agent includes O⁶BG and/or BCNU. In various embodiments, the method includes administering one or more immunosuppression agents to the subject, optionally where the administration of the one or more immunosuppression agents is prior to the administration of the adenoviral vector.

[0021] In at least one aspect, the present disclosure provides an adenoviral donor vector including: (a) a capsid including one or more viral polypeptides of an Ad3, Ad7, Ad11, Ad14, Ad16, Ad21, Ad34, Ad37, or Ad50 serotype, where the one or more viral polypeptides include one or more of a: (i) fiber knob; (ii) fiber shaft; (iii) fiber tail; (iv) penton; and (v) hexon; and (b) a double-stranded DNA genome including a heterologous nucleic acid payload. In various embodiments, the genome further includes: (a) a 3′ ITR and a 5′ ITR, where each of the 3′ ITR and the 5′ ITR are of the viral polypeptide serotype; and (b) a packaging sequence, where the packing sequence is of the viral polypeptide serotype. In various embodiments, the heterologous nucleic acid payload includes a selectable marker, optionally where the selectable marker is MGMT^{P140K}.

[0022] In various embodiments, the one or more viral polypeptides include the: (a) fiber knob and fiber shaft; (b) fiber knob and fiber tail; (c) fiber knob and penton; (d) fiber knob and hexon; (e) fiber knob, hexon, and penton; (f) fiber shaft and fiber tail; (g) fiber shaft and penton; (h) fiber shaft and hexon; (i) fiber shaft, hexon, and penton; (j) fiber tail and penton; (k) fiber tail and hexon; (l) fiber tail, hexon, and penton; (m) fiber knob, fiber shaft, and fiber tail; (n) fiber knob, fiber shaft, and penton; (o) fiber knob, fiber shaft, and hexon; (p) fiber knob, fiber shaft, hexon, and penton; (q) fiber knob, fiber shaft, fiber tail, and penton; (r) fiber knob, fiber shaft, fiber tail, penton, and hexon; or (s) penton and hexon. In various embodiments, the fiber knob has a sequence that has at least 80% identity to a sequence selected from SEQ ID NOs: 15, 33, 51, 69, 87, 105, 123, 141, and 159. In various embodiments, the fiber shaft has a sequence that has at least 80% identity to a sequence selected from SEQ ID NOs: 14, 32, 50, 68, 86, 104, 122, 140, and 158. In various embodiments, the fiber tail has a sequence that has at least 80% identity to a sequence selected from SEQ ID NOs: 18, 36, 54, 72, 90, 108, 126, 144, and 162. In various embodiments, the penton has a sequence that has at least 80% identity to a sequence selected from SEQ ID NOs: 16, 34, 52, 70, 88, 106, 124, 142, and 160. In various embodiments, the hexon has a sequence that has at least 80% identity to a sequence selected from SEQ ID NOs: 17, 35, 53, 71, 89, 107, 125, 143, and 161. In various embodiments, the adenoviral vector includes a fiber of the serotype of the viral peptides. In various embodiments, the fiber has a sequence that has at least 80% identity to a sequence selected from SEQ ID NOs: SEQ ID NOs: 13, 31, 49, 67, 85, 103, 121, 139, and 157. In various embodiments, the adenoviral vector is a chimeric vector characterized in that the capsid includes at least one of a fiber knob, fiber shaft, fiber tail, hexon, or penton that is not of the serotype of the viral peptides. In various embodiments, the adenoviral vector is a helper dependent vector.

[0023] In at least one aspect, the present disclosure provides an adenoviral donor vector genome including: (a) a 3′ ITR and a 5′ ITR, where the 3′ ITR and the 5′ ITR are each of the same serotype selected from Ad3, Ad7, Ad11, Ad14, Ad16, Ad21, Ad34, Ad37, and Ad50; (b) a packaging sequence, where the packing sequence is of the ITR serotype; and (c) a heterologous nucleic acid payload. In various embodiments, the heterologous nucleic acid payload includes a selectable marker, optionally where the selectable marker is MGMT^{P140K}.

[0024] In various embodiments, the heterologous nucleic acid payload encodes a protein. In various embodiments, the heterologous nucleic acid payload encodes a chimeric antigen receptor (CAR), T cell receptor (TCR), or small RNA, optionally where the small RNA is an shRNA. In various embodiments, the heterologous nucleic acid payload encodes a gene editing enzyme or system, where the gene editing is selected from CRISPR editing, base editing, prime editing, or zinc finger nuclease editing. In various embodiments, the heterologous nucleic acid payload encodes an agent for treatment of a condition selected from adenosine deaminase deficiency (ADA), adrenoleukodystrophy (ALD), agammaglobulinemia, alpha-1 antitrypsin deficiency, congenital amegakaryocytic thrombocytopenia, amyotrophic lateral sclerosis (Lou Gehrig's disease), ataxia telangiectasia, Batten disease, Bernard-Soulier Syndrome, CD40/CD40L deficiency, chronic granulomatous disease, common variable immune deficiency (CVID), congenital thrombotic thrombocytopenic purpura (cTTP), cystic fibrosis, Diamond Blackfan anemia (DBA), DOCK 8 deficiency, dyskeratosis congenital, Fabry disease, Factor V Deficiency, Factor VII Deficiency, Factor X Deficiency, Factor XI Deficiency, Factor XII Deficiency, Factor XIII Deficiency, familial apolipoprotein E deficiency and atherosclerosis (ApoE), familial erythrophagocytic lymphohistiocytosis, Fanconi anemia (FA), Friedreich ataxia, Gaucher disease, Glanzmann thrombasthenia, glucosemia, glycogen storage disease, glycogen storage disease type I (GSDI), Gray Platelet Syndrome, hemophilia, hemophilia A, hemophilia B, hereditary hemochromatosis, Hurler's syndrome, hyper IgM, Hypogammaglobulinemia, Krabbe disease, major histocompatibility complex class II deficiency (MHC-II), maple syrup urine disease, metachromatic leukodystrophy (MLD), mucopolysaccharidoses, mucopolysaccharidosis type I (MPS I), MPS II (Hunter Syndrome), MPS III (Sanfilippo syndrome), MPS IV (Morquio syndrome), MPS V, MPS VI (Maroteaux-Lamy syndrome), MPS VII (sly syndrome), muscular dystrophy, Niemann-Pick disease, Parkinson's disease, paroxysmal nocturnal hemoglobinuria (PNH), pernicious anemia, phenylketonuria (PKU), Pompe disease, pulmonary alveolar proteinosis (PAP), pure red cell aplasia (PRCA), pyruvate kinase deficiency, refractory anemia, Shwachman-Diamond syndrome, selective IgA deficiency, severe aplastic anemia, severe combined immunodeficiency disease (SCID), Severe combined immunodeficiency due to adenosine deaminase deficiency (ADA-SCID), sickle cell anemia, sickle cell disease, sickle cell trait, Tay Sachs, thalassemia, thalassemia intermedia, von Gierke disease, von Willebrand Disease, Wiskott-Aldrich syndrome (WAS), X-linked agammaglobulinemia (XLA), X-linked severe combined immunodeficiency (SCID-X1), Zellweger syndrome, α-mannosidosis, β-mannosidosis, β-thalassemia, and/or β-thalassemia major.

[0025] In various embodiments, the present disclosure provides a pharmaceutical composition including an adenoviral vector of the present disclosure, where the pharmaceutical composition is formulated for injection to a subject in need thereof.

### Definitions

[0026] A, An, The: As used herein, “a”, “an”, and “the” refer to one or to more than one (i.e., to at least one) of the grammatical object of the article. By way of example, “an element” discloses embodiments of exactly one element and embodiments including more than one element.

[0027] About: As used herein, term “about”, when used in reference to a value, refers to a value that is similar, in context to the referenced value. In general, those skilled in the art, familiar with the context, will appreciate the relevant degree of variance encompassed by “about” in that context. For example, in some embodiments, the term “about” may encompass a range of values that within 25%, 20%, 19%, 18%, 17%, 16%, 15%, 14%, 13%, 12%, 11%, 10%, 9%, 8%, 7%, 6%, 5%, 4%, 3%, 2%, 1%, or less of the referenced value.

[0028] Administration: As used herein, the term “administration” typically refers to administration of a composition to a subject or system to achieve delivery of an agent that is, or is included in, the composition.

[0029] Adoptive cell therapy: As used herein, “adoptive cell therapy” or “ACT” involves transfer of cells with a therapeutic activity into a subject, e.g., a subject in need of treatment for a condition, disorder, or disease. In some embodiments, ACT includes transfer into a subject of cells after ex vivo and/or in vitro engineering and/or expansion of the cells.

[0030] Affinity: As used herein, “affinity” refers to the strength of the sum total of non-covalent interactions between a particular binding agent (e.g., a viral vector), and/or a binding moiety thereof, with a binding target (e.g., a cell or cell type). Unless indicated otherwise, as used herein, “binding affinity” refers to a 1:1 interaction between a binding agent and a binding target thereof (e.g., a viral vector with a target cell of the viral vector). Those of skill in the art appreciate that a change in affinity can be described by comparison to a reference (e.g., increased or decreased relative to a reference), or can be described numerically. Affinity can be measured and/or expressed in a number of ways known in the art, including, but not limited to, equilibrium dissociation constant (K_{D}) and/or equilibrium association constant (K_{A}). K_{D} is the quotient of k_{off}/kₒₙ, whereas K_{A} is the quotient of kₒₙ/k_{off}, where kₒₙ refers to the association rate constant of, e.g., viral vector with target cell, and k_{off} refers to the dissociation of, e.g., viral vector from target cell. The kₒₙ and k_{off} can be determined by techniques known to those of skill in the art.

[0031] Agent: As used herein, the term “agent” may refer to any chemical entity, including without limitation any of one or more of an atom, molecule, compound, amino acid, polypeptide, nucleotide, nucleic acid, protein, protein complex, liquid, solution, saccharide, polysaccharide, lipid, or combination or complex thereof.

[0032] Allogeneic: As used herein, term “allogeneic” refers to any material derived from one subject which is then introduced to another subject, e.g., allogeneic HSC transplantation.

[0033] Antibody: As used herein, the term “antibody” refers to a polypeptide that includes one or more canonical immunoglobulin sequence elements sufficient to confer specific binding to a particular antigen (e.g., a heavy chain variable domain, a light chain variable domain, and/or one or more CDRs). Thus, the term antibody includes, without limitation, human antibodies, non-human antibodies, synthetic and/or engineered antibodies, fragments thereof, and agents including the same. Antibodies can be naturally occurring immunoglobulins (e.g., generated by an organism reacting to an antigen). Synthetic, non-naturally occurring, or engineered antibodies can be produced by recombinant engineering, chemical synthesis, or other artificial systems or methodologies known to those of skill in the art.

[0034] As is well known in the art, typical human immunoglobulins are approximately 150 kD tetrameric agents that include two identical heavy (H) chain polypeptides (about 50 kD each) and two identical light (L) chain polypeptides (about 25 kD each) that associate with each other to form a structure commonly referred to as a “Y-shaped” structure. Typically, each heavy chain includes a heavy chain variable domain (VH) and a heavy chain constant domain (CH). The heavy chain constant domain includes three CH domains: CH1, CH2 and CH3. A short region, known as the “switch”, connects the heavy chain variable and constant regions. The “hinge” connects CH2 and CH3 domains to the rest of the immunoglobulin. Each light chain includes a light chain variable domain (VL) and a light chain constant domain (CL), separated from one another by another “switch.” Each variable domain contains three hypervariable loops known as “complement determining regions” (CDR1, CDR2, and CDR3) and four somewhat invariant “framework” regions (FR1, FR2, FR3, and FR4). In each VH and VL, the three CDRs and four FRs are arranged from amino-terminus to carboxy-terminus in the following order: FR1, CDR1, FR2, CDR2, FR3, CDR3, and FR4. The variable regions of a heavy and/or a light chain are typically understood to provide a binding moiety that can interact with an antigen. Constant domains can mediate binding of an antibody to various immune system cells (e.g., effector cells and/or cells that mediate cytotoxicity), receptors, and elements of the complement system. Heavy and light chains can be linked to one another by a single disulfide bond, and two other disulfide bonds can connect the heavy chain hinge regions to one another, so that dimers are connected to one another and the tetramer is formed. When natural immunoglobulins fold, the FR regions form the beta sheets that provide the structural framework for the domains, and the CDR loop regions from both the heavy and light chains are brought together in three-dimensional space so that they create a single hypervariable antigen binding site located at the tip of the Y structure.

[0035] In some embodiments, an antibody is a polyclonal, monoclonal, monospecific, or multispecific antibody (e.g., a bispecific antibody). In some embodiments, an antibody includes at least one light chain monomer or dimer, at least one heavy chain monomer or dimer, at least one heavy chain-light chain dimer, or a tetramer that includes two heavy chain monomers and two light chain monomers. Moreover, the term “antibody” can include (unless otherwise stated or clear from context) any art-known constructs or formats utilizing antibody structural and/or functional features including without limitation intrabodies, domain antibodies, antibody mimetics, Zybodies®, Fab fragments, Fab′ fragments, F(ab′)2 fragments, Fd′ fragments, Fd fragments, isolated CDRs or sets thereof, single chain antibodies, single-chain Fvs (scFvs), disulfide-linked Fvs (sdFv), polypeptide-Fc fusions, single domain antibodies (e.g., shark single domain antibodies such as IgNAR or fragments thereof), cameloid antibodies, camelized antibodies, masked antibodies (e.g., Probodies®), affybodies, anti-idiotypic (anti-Id) antibodies (including, e.g., anti-anti-Id antibodies), Small Modular ImmunoPharmaceuticals (“SMIPs™”), single chain or Tandem diabodies (TandAb®), VHHs, Anticalins®, Nanobodies® minibodies, BiTE®s, ankyrin repeat proteins or DARPINs®, Avimers®, DARTs, TCR-like antibodies, Adnectins®, Affilins®, Trans-bodies®, Affibodies®, TrimerX®, MicroProteins, Fynomers®, Centyrins®, and KALBITOR®s, CARs, engineered TCRs, and antigen-binding fragments of any of the above.

[0036] In various embodiments, an antibody includes one or more structural elements recognized by those skilled in the art as a complementarity determining region (CDR) or variable domain. In some embodiments, an antibody can be a covalently modified (“conjugated”) antibody (e.g., an antibody that includes a polypeptide including one or more canonical immunoglobulin sequence elements sufficient to confer specific binding to a particular antigen, where the polypeptide is covalently linked with one or more of a therapeutic agent, a detectable moiety, another polypeptide, a glycan, or a polyethylene glycol molecule). In some embodiments, antibody sequence elements are humanized, primatized, chimeric, etc, as is known in the art.

[0037] An antibody including a heavy chain constant domain can be, without limitation, an antibody of any known class, including but not limited to, IgA, secretory IgA, IgG, IgE and IgM, based on heavy chain constant domain amino acid sequence (e.g., alpha (α), delta (δ), epsilon (ε), gamma (γ) and mu (μ)). IgG subclasses are also well known to those in the art and include but are not limited to human IgG1, IgG2, IgG3 and IgG4. “Isotype” refers to the Ab class or subclass (e.g., IgM or IgG1) that is encoded by the heavy chain constant region genes. As used herein, a “light chain” can be of a distinct type, e.g., kappa (κ) or lambda (λ), based on the amino acid sequence of the light chain constant domain. In some embodiments, an antibody has constant region sequences that are characteristic of mouse, rabbit, primate, or human immunoglobulins. Naturally-produced immunoglobulins are glycosylated, typically on the CH2 domain. As is known in the art, affinity and/or other binding attributes of Fc regions for Fc receptors can be modulated through glycosylation or other modification. In some embodiments, an antibody may lack a covalent modification (e.g., attachment of a glycan) that it would have if produced naturally. In some embodiments, antibodies produced and/or utilized in accordance with the present invention include glycosylated Fc domains, including Fc domains with modified or engineered such glycosylation.

[0038] Between or From: As used herein, the term “between” refers to content that falls between indicated upper and lower, or first and second, boundaries, inclusive of the boundaries. Similarly, the term “from”, when used in the context of a range of values, indicates that the range includes content that falls between indicated upper and lower, or first and second, boundaries, inclusive of the boundaries.

[0039] Binding: As used herein, the term “binding” refers to a non-covalent association between or among two or more agents. “Direct” binding involves physical contact between agents; indirect binding involves physical interaction by way of physical contact with one or more intermediate agents. Binding between two or more agents can occur and/or be assessed in any of a variety of contexts, including where interacting agents are studied in isolation or in the context of more complex systems (e.g., while covalently or otherwise associated with a carrier agents and/or in a biological system or cell).

[0040] Biological Sample: As used herein, the term “biological sample” refers to a sample obtained or derived from a biological source (e.g., a tissue or organism or cell culture) of interest, as described herein. In some embodiments, a biological source is or includes an organism, such as an animal or human. In some embodiments, a biological sample is or includes biological tissue or fluid. In some embodiments, a biological sample can be or include cells (e.g., hematopoietic cells), tissue, or bodily fluid (e.g., blood). A biological sample can be a “primary sample” obtained directly from a biological source, or can be a “processed sample” (e.g., a sample prepared from a primary sample). A biological sample can also be referred to as a “sample.”

[0041] Cancer: As used herein, the term “cancer” refers to a condition, disorder, or disease in which cells exhibit relatively abnormal, uncontrolled, and/or autonomous growth, so that they display an abnormally elevated proliferation rate and/or aberrant growth phenotype characterized by a significant loss of control of cell proliferation. In some embodiments, a cancer can include one or more tumors. In some embodiments, a cancer can be or include cells that are precancerous (e.g., benign), malignant, pre-metastatic, metastatic, and/or non-metastatic. In some embodiments, a cancer can be or include a solid tumor. In some embodiments, a cancer can be or include a hematologic tumor.

[0042] Chimeric antigen receptor: As used herein, “Chimeric antigen receptor” or “CAR” refers to an engineered protein that includes (i) an extracellular domain that includes a moiety that binds a target antigen; (ii) a transmembrane domain; and (iii) an intracellular signaling domain that sends activating signals when the CAR is stimulated by binding of the extracellular binding moiety with a target antigen. CARs are also known as chimeric T cell receptors or chimeric immunoreceptors.

[0043] Combination therapy: As used herein, the term “combination therapy” refers to administration to a subject of to two or more agents or regimens such that the two or more agents or regimens together treat a condition, disorder, or disease of the subject. In some embodiments, the two or more therapeutic agents or regimens can be administered simultaneously, sequentially, or in overlapping dosing regimens. Those of skill in the art will appreciate that combination therapy includes but does not require that the two agents or regimens be administered together in a single composition, nor at the same time.

[0044] Control expression or activity: As used herein, a first element (e.g., a protein, such as a transcription factor, or a nucleic acid sequence, such as promoter) “controls” or “drives” expression or activity of a second element (e.g., a protein or a nucleic acid encoding an agent such as a protein) if the expression or activity of the second element is wholly or partially dependent upon status (e.g., presence, absence, conformation, chemical modification, interaction, or other activity) of the first under at least one set of conditions. Control of expression or activity can be substantial control or activity, e.g., in that a change in status of the first element can, under at least one set of conditions, result in a change in expression or activity of the second element of at least 10% (e.g., at least 20%, 30%, 40%, 50%, 60%, 70%, 80%, 90%, 100%, 2-fold, 3-fold, 4-fold, 5-fold, 10-fold, 20-fold, 30-fold, 40-fold, 50-fold, 100-fold) as compared to a reference control.

[0045] Corresponding to: As used herein, the term “corresponding to” may be used to designate the position/identity of a structural element in a compound or composition through comparison with an appropriate reference compound or composition. For example, in some embodiments, a monomeric residue in a polymer (e.g., an amino acid residue in a polypeptide or a nucleic acid residue in a polynucleotide) may be identified as “corresponding to” a residue in an appropriate reference polymer. For example, those of skill in the art appreciate that residues in a provided polypeptide or polynucleotide sequence are often designated (e.g., numbered or labeled) according to the scheme of a related reference sequence (even if, e.g., such designation does not reflect literal numbering of the provided sequence). By way of illustration, if a reference sequence includes a particular amino acid motif at positions 100-110, and a second related sequence includes the same motif at positions 110-120, the motif positions of the second related sequence can be said to “correspond to” positions 100-110 of the reference sequence. Those of skill in the art appreciate that corresponding positions can be readily identified, e.g., by alignment of sequences, and that such alignment is commonly accomplished by any of a variety of known tools, strategies, and/or algorithms, including without limitation software programs such as, for example, BLAST, CS-BLAST, CUDASW++, DIAMOND, FASTA, GGSEARCH/GLSEARCH, Genoogle, HMMER, HHpred/HHsearch, IDF, Infernal, KLAST, USEARCH, parasail, PSI-BLAST, PSI-Search, ScalaBLAST, Sequilab, SAM, SSEARCH, SWAPHI, SWAPHI-LS, SWIMM, or SWIPE.

[0046] Dosing regimen: As used herein, the term “dosing regimen” can refer to a set of one or more same or different unit doses administered to a subject, typically including a plurality of unit doses administration of each of which is separated from administration of the others by a period of time. In various embodiments, one or more or all unit doses of a dosing regimen may be the same or can vary (e.g., increase over time, decrease over time, or be adjusted in accordance with the subject and/or with a medical practitioner's determination). In various embodiments, one or more or all of the periods of time between each dose may be the same or can vary (e.g., increase over time, decrease over time, or be adjusted in accordance with the subject and/or with a medical practitioner's determination). In some embodiments, a given therapeutic agent has a recommended dosing regimen, which can involve one or more doses. Typically, at least one recommended dosing regimen of a marketed drug is known to those of skill in the art. In some embodiments, a dosing regimen is correlated with a desired or beneficial outcome when administered across a relevant population (i.e., is a therapeutic dosing regimen).

[0047] Downstream and Upstream: As used herein, the term“downstream” means that a first DNA region is closer, relative to a second DNA region, to the C-terminus of a nucleic acid that includes the first DNA region and the second DNA region. As used herein, the term “upstream” means a first DNA region is closer, relative to a second DNA region, to the N-terminus of a nucleic acid that includes the first DNA region and the second DNA region.

[0048] Effective amount: An “effective amount” is the amount of a composition (e.g., a formulation) necessary to result in a desired physiological change in a subject. Effective amounts are often administered for research purposes.

[0049] Engineered: As used herein, the term “engineered” refers to the aspect of having been manipulated by the hand of man. For example, a polynucleotide is considered to be “engineered” when two or more sequences, that are not linked together in that order in nature, are manipulated by the hand of man to be directly linked to one another in the engineered polynucleotide. Those of skill in the art will appreciate that an “engineered” nucleic acid or amino acid sequence can be a recombinant nucleic acid or amino acid sequence, and can be referred to as “genetically engineered.” In some embodiments, an engineered polynucleotide includes a coding sequence and/or a regulatory sequence that is found in nature operably linked with a first sequence but is not found in nature operably linked with a second sequence, which is in the engineered polynucleotide operably linked in with the second sequence by the hand of man. In some embodiments, a cell or organism is considered to be “engineered” or “genetically engineered” if it has been manipulated so that its genetic information is altered (e.g., new genetic material not previously present has been introduced, for example by transformation, mating, somatic hybridization, transfection, transduction, or other mechanism, or previously present genetic material is altered or removed, for example by substitution, deletion, or mating). As is common practice and is understood by those of skill in the art, progeny or copies, perfect or imperfect, of an engineered polynucleotide or cell are typically still referred to as “engineered” even though the direct manipulation was of a prior entity.

[0050] Excipient: As used herein, “excipient” refers to a non-therapeutic agent that may be included in a pharmaceutical composition, for example to provide or contribute to a desired consistency or stabilizing effect. In some embodiments, suitable pharmaceutical excipients may include, for example, starch, glucose, lactose, sucrose, gelatin, malt, rice, flour, chalk, silica gel, sodium stearate, glycerol monostearate, talc, sodium chloride, dried skim milk, glycerol, propylene, glycol, water, ethanol, or the like.

[0051] Expression: As used herein, “expression” refers individually and/or cumulatively to one or more biological process that result in production from a nucleic acid sequence of an encoded agent, such as a protein. Expression specifically includes either or both of transcription and translation.

[0052] Flank: As used herein, a first element (e.g., a nucleic acid sequence or amino acid sequence) present in a contiguous sequence with a second element and a third element is “flanked” by the second element and third element if it is positioned in the contiguous sequence between the second element and the third element. Accordingly, in such arrangement, the second element and third element can be referred to as “flanking” the first element. Flanking elements can be immediately adjacent to a flanked element or separated from the flanked element by one or more relevant units. In various examples in which the contiguous sequence is a nucleic acid or amino acid sequence, and the relevant units are bases or amino acid residues, respectively, the number of units in the contiguous sequence that are between a flanked element and, independently, first and/or second flanking elements can be, e.g., 50 units or less, e.g., no more than 50, 45, 40, 35, 30, 25, 20, 15, 10, 5, 4, 3, 2, 1, or 0 units.

[0053] Fragment: As used herein, “fragment” refers a structure that includes and/or consists of a discrete portion of a reference agent (sometimes referred to as the “parent” agent). In some embodiments, a fragment lacks one or more moieties found in the reference agent. In some embodiments, a fragment includes or consists of one or more moieties found in the reference agent. In some embodiments, the reference agent is a polymer such as a polynucleotide or polypeptide. In some embodiments, a fragment of a polymer includes or consists of at least 3, 4, 5, 6, 7, 8, 9, 10, 11, 12, 13, 14, 15, 16, 17, 18, 19, 20, 25, 30, 35, 40, 45, 50, 55, 60, 65, 70, 75, 80, 85, 90, 95, 100, 110, 120, 130, 140, 150, 160, 170, 180, 190, 200, 210, 220, 230, 240, 250, 275, 300, 325, 350, 375, 400, 425, 450, 475, 500 or more monomeric units (e.g., residues) of the reference polymer. In some embodiments, a fragment of a polymer includes or consists of at least 5%, 10%, 15%, 20%, 25%, 30%, 25%, 40%, 45%, 50%, 55%, 60%, 65%, 70%, 75%, 80%, 85%, 90%, 95%, 96%, 97%, 98%, 99% or more of the monomeric units (e.g., residues) found in the reference polymer. A fragment of a reference polymer is not necessarily identical to a corresponding portion of the reference polymer. For example, a fragment of a reference polymer can be a polymer having a sequence of residues having at least 5%, 10%, 15%, 20%, 25%, 30%, 25%, 40%, 45%, 50%, 55%, 60%, 65%, 70%, 75%, 80%, 85%, 90%, 95%, 96%, 97%, 98%, 99% or more identity to the reference polymer. A fragment may, or may not, be generated by physical fragmentation of a reference agent. In some instances, a fragment is generated by physical fragmentation of a reference agent. In some instances, a fragment is not generated by physical fragmentation of a reference agent and can be instead, for example, produced by de novo synthesis or other means.

[0054] Gene, Transgene: As used herein, the term “gene” refers to a DNA sequence that is or includes coding sequence (i.e., a DNA sequence that encodes an expression product, such as an RNA product and/or a polypeptide product), optionally together with some or all of regulatory sequences that control expression of the coding sequence. In some embodiments, a gene includes non-coding sequence such as, without limitation, introns. In some embodiments, a gene may include both coding (e.g., exonic) and non-coding (e.g., intronic) sequences. In some embodiments, a gene includes a regulatory sequence that is a promoter. In some embodiments, a gene includes one or both of a (i) DNA nucleotides extending a predetermined number of nucleotides upstream of the coding sequence in a reference context, such as a source genome, and (ii) DNA nucleotides extending a predetermined number of nucleotides downstream of the coding sequence in a reference context, such as a source genome. In various embodiments, the predetermined number of nucleotides can be 500 bp, 1 kb, 2 kb, 3 kb, 4 kb, 5 kb, 10 kb, 20 kb, 30 kb, 40 kb, 50 kb, 75 kb, or 100 kb. As used herein, a “transgene” refers to a gene that is not endogenous or native to a reference context in which the gene is present or into which the gene may be placed by engineering.

[0055] Gene product or expression product: As used herein, the term “gene product” or “expression product” generally refers to an RNA transcribed from the gene (pre-and/or post-processing) or a polypeptide (pre- and/or post-modification) encoded by an RNA transcribed from the gene.

[0056] Host cell, target cell: As used herein, “host cell” refers to a cell into which exogenous DNA (recombinant or otherwise), such as a transgene, has been introduced. Those of skill in the art appreciate that a “host cell” can be the cell into which the exogenous DNA was initially introduced and/or progeny or copies, perfect or imperfect, thereof. In some embodiments, a host cell includes one or more viral genes or transgenes. In some embodiments, a host cell is a cell that has been entered by a viral vector, e.g., a vector of the present disclosure, or a viral genome thereof, e.g., a viral genome disclosed herein. In some embodiments, an intended or potential host cell can be referred to as a target cell. In some embodiments, a cell or type of cell that is selectively entered and/or selectively transduced by a viral vector of the present disclosure can be referred to as a target cell of the viral vector. In some embodiments, a host cell that has been entered and/or transduced (e.g., selectively entered and/or selectively transduced) by a viral vector of the present disclosure can be referred to as a target cell of the viral vector. In some embodiments, the terms “host cell” or “target cell” include progeny of a cell that has been entered and/or transduced (e.g., selectively entered and/or selectively transduced) by a viral vector of the present disclosure, e.g., progeny that include exogenous DNA sequences derived from DNA sequences introduced by the viral vector.

[0057] In various embodiments, a host cell or target cell is identified by the presence, absence, or expression level of various surface markers.

[0058] A statement that a cell or population of cells is “positive” for or expressing a particular marker refers to the detectable presence on or in the cell of the particular marker. When referring to a surface marker, the term can refer to the presence of surface expression as detected by flow cytometry, for example, by staining with an antibody that specifically binds to the marker and detecting said antibody, where the staining is detectable by flow cytometry at a level substantially above the staining detected carrying out the same procedure with an isotype-matched control under otherwise identical conditions and/or at a level substantially similar to that for cell known to be positive for the marker, and/or at a level substantially higher than that for a cell known to be negative for the marker.

[0059] A statement that a cell or population of cells is “negative” for a particular marker or lacks expression of a marker refers to the absence of substantial detectable presence on or in the cell of a particular marker. When referring to a surface marker, the term can refer to the absence of surface expression as detected by flow cytometry, for example, by staining with an antibody that specifically binds to the marker and detecting said antibody, where the staining is not detected by flow cytometry at a level substantially above the staining detected carrying out the same procedure with an isotype-matched control under otherwise identical conditions, and/or at a level substantially lower than that for cell known to be positive for the marker, and/or at a level substantially similar as compared to that for a cell known to be negative for the marker.

[0060] Identity: As used herein, the term “identity” refers to the overall relatedness between polymeric molecules, e.g., between nucleic acid molecules (e.g., DNA molecules and/or RNA molecules) and/or between polypeptide molecules. Methods for the calculation of a percent identity as between two provided sequences are known in the art. The term “% sequence identity” refers to a relationship between two or more sequences, as determined by comparing the sequences. In the art, “identity” also means the degree of sequence relatedness between protein and nucleic acid sequences as determined by the match between strings of such sequences. “Identity” (often referred to as “similarity”) can be readily calculated by known methods, including those described in: Computational Molecular Biology (Lesk, A. M., ed.) Oxford University Press, NY (1988); Biocomputing: Informatics and Genome Projects (Smith, D. W., ed.) Academic Press, NY (1994); Computer Analysis of Sequence Data, Part I (Griffin, A. M., and Griffin, H. G., eds.) Humana Press, NJ (1994); Sequence Analysis in Molecular Biology (Von Heijne, G., ed.) Academic Press (1987); and Sequence Analysis Primer (Gribskov, M. and Devereux, J., eds.) Oxford University Press, NY (1992). Preferred methods to determine identity are designed to give the best match between the sequences tested. Methods to determine identity and similarity are codified in publicly available computer programs. For instance, calculation of the percent identity of two nucleic acid or polypeptide sequences, for example, can be performed by aligning the two sequences (or the complement of one or both sequences) for optimal comparison purposes (e.g., gaps can be introduced in one or both of a first and a second sequences for optimal alignment and non-identical sequences can be disregarded for comparison purposes). The nucleotides or amino acids at corresponding positions are then compared. When a position in the first sequence is occupied by the same residue (e.g., nucleotide or amino acid) as the corresponding position in the second sequence, then the molecules are identical at that position. The percent identity between the two sequences is a function of the number of identical positions shared by the sequences, optionally accounting for the number of gaps, and the length of each gap, which may need to be introduced for optimal alignment of the two sequences. The comparison of sequences and determination of percent identity between two sequences can be accomplished using a computational algorithm, such as BLAST (basic local alignment search tool). Sequence alignments and percent identity calculations may be performed using the Megalign program of the LASERGENE bioinformatics computing suite (DNASTAR, Inc., Madison, Wisconsin). Multiple alignment of the sequences can also be performed using the Clustal method of alignment (Higgins and Sharp CABIOS, 5, 151-153 (1989) with default parameters (GAP PENALTY=10, GAP LENGTH PENALTY=10). Relevant programs also include the GCG suite of programs (Wisconsin Package Version 9.0, Genetics Computer Group (GCG), Madison, Wisconsin); BLASTP, BLASTN, BLASTX (Altschul et al., J. Mol. Biol. 215:403-410 (1990); DNASTAR (DNASTAR, Inc., Madison, Wisconsin); and the FASTA program incorporating the Smith-Waterman algorithm (Pearson, Comput. Methods Genome Res., [Proc. Int. Symp.](1994), Meeting Date 1992, 111-20. Editor(s): Suhai, Sandor. Publisher: Plenum, New York, N.Y. Within the context of this disclosure, it will be understood that where sequence analysis software is used for analysis, the results of the analysis are based on the “default values” of the program referenced. “Default values” will mean any set of values or parameters, which originally load with the software when first initialized.

[0061] “Improve,” “increase,” “inhibit,” or “reduce”: As used herein, the terms “improve”, “increase”, “inhibit”, and “reduce”, and grammatical equivalents thereof, indicate qualitative or quantitative difference from a reference.

[0062] Isolated: As used herein, “isolated” refers to a substance and/or entity that has been (1) separated from at least some of the components with which it was associated when initially produced (whether in nature and/or in an experimental setting), and/or (2) designed, produced, prepared, and/or manufactured by the hand of man. Isolated substances and/or entities may be separated from 10%, 20%, 30%, 40%, 50%, 60%, 70%, 80%, 90%, 91%, 92%, 93%, 94%, 95%, 96%, 97%, 98%, 99%, or more than 99% of the other components with which they were initially associated. In some embodiments, isolated agents are 80%, 85%, 90%, 91%, 92%, 93%, 94%, 95%, 96%, 97%, 98%, 99%, or more than 99% pure. As used herein, a substance is “pure” if it is substantially free of other components. In some embodiments, as will be understood by those skilled in the art, a substance may still be considered “isolated” or even “pure”, after having been combined with certain other components such as, for example, one or more carriers or excipients (e.g., buffer, solvent, water, etc.); in such embodiments, percent isolation or purity of the substance is calculated without including such carriers or excipients. To give but one example, in some embodiments, a biological polymer such as a polypeptide or polynucleotide that occurs in nature is considered to be “isolated” when, a) by virtue of its origin or source of derivation is not associated with some or all of the components that accompany it in its native state in nature; b) it is substantially free of other polypeptides or nucleic acids of the same species from the species that produces it in nature; c) is expressed by or is otherwise in association with components from a cell or other expression system that is not of the species that produces it in nature. Thus, for instance, in some embodiments, a polypeptide that is chemically synthesized or is synthesized in a cellular system different from that which produces it in nature is considered to be an “isolated” polypeptide. Alternatively or additionally, in some embodiments, a polypeptide that has been subjected to one or more purification techniques may be considered to be an “isolated” polypeptide to the extent that it has been separated from other components a) with which it is associated in nature; and/or b) with which it was associated when initially produced.

[0063] Operably linked: As used herein, “operably linked” or “operatively linked” refers to the association of at least a first element and a second element such that the component elements are in a relationship permitting them to function in their intended manner. For example, a nucleic acid regulatory sequence is “operably linked” to a nucleic acid coding sequence if the regulatory sequence and coding sequence are associated in a manner that permits control of expression of the coding sequence by the regulatory sequence. In some embodiments, an “operably linked” regulatory sequence is directly or indirectly covalently associated with a coding sequence (e.g., in a single nucleic acid). In some embodiments, a regulatory sequence controls expression of a coding sequence in trans and inclusion of the regulatory sequence in the same nucleic acid as the coding sequence is not a requirement of operable linkage.

[0064] Pharmaceutically acceptable: As used herein, the term “pharmaceutically acceptable,” as applied to one or more, or all, component(s) for formulation of a composition as disclosed herein, means that each component must be compatible with the other ingredients of the composition and not deleterious to the recipient thereof.

[0065] Pharmaceutically acceptable carrier: As used herein, the term “pharmaceutically acceptable carrier” refers to a pharmaceutically-acceptable material, composition, or vehicle, such as a liquid or solid filler, diluent, excipient, or solvent encapsulating material, that facilitates formulation of an agent (e.g., a pharmaceutical agent), modifies bioavailability of an agent, or facilitates transport of an agent from one organ or portion of a subject to another. Some examples of materials which can serve as pharmaceutically-acceptable carriers include: sugars, such as lactose, glucose and sucrose; starches, such as corn starch and potato starch; cellulose, and its derivatives, such as sodium carboxymethyl cellulose, ethyl cellulose and cellulose acetate; powdered tragacanth; malt; gelatin; talc; excipients, such as cocoa butter and suppository waxes; oils, such as peanut oil, cottonseed oil, safflower oil, sesame oil, olive oil, corn oil and soybean oil; glycols, such as propylene glycol; polyols, such as glycerin, sorbitol, mannitol and polyethylene glycol; esters, such as ethyl oleate and ethyl laurate; agar; buffering agents, such as magnesium hydroxide and aluminum hydroxide; alginic acid; pyrogen-free water; isotonic saline; Ringer's solution; ethyl alcohol; pH buffered solutions; polyesters, polycarbonates and/or polyanhydrides; and other non-toxic compatible substances employed in pharmaceutical formulations.

[0066] Pharmaceutical composition: As used herein, the term “pharmaceutical composition” refers to a composition in which an active agent is formulated together with one or more pharmaceutically acceptable carriers.

[0067] Promoter: As used herein, a “promoter” or “promoter sequence” can be a DNA regulatory region that directly or indirectly (e.g., through promoter-bound proteins or substances) participates in initiation and/or processivity of transcription of a coding sequence. A promoter may, under suitable conditions, initiate transcription of a coding sequence upon binding of one or more transcription factors and/or regulatory moieties with the promoter. A promoter that participates in initiation of transcription of a coding sequence can be “operably linked” to the coding sequence. In certain instances, a promoter can be or include a DNA regulatory region that extends from a transcription initiation site (at its 3′ terminus) to an upstream (5′ direction) position such that the sequence so designated includes one or both of a minimum number of bases or elements necessary to initiate a transcription event. A promoter may be, include, or be operably associated with or operably linked to, expression control sequences such as enhancer and repressor sequences. In some embodiments, a promoter may be inducible. In some embodiments, a promoter may be a constitutive promoter. In some embodiments, a conditional (e.g., inducible) promoter may be unidirectional or bi-directional. A promoter may be or include a sequence identical to a sequence known to occur in the genome of particular species. In some embodiments, a promoter can be or include a hybrid promoter, in which a sequence containing a transcriptional regulatory region can be obtained from one source and a sequence containing a transcription initiation region can be obtained from a second source. Systems for linking control elements to coding sequence within a transgene are well known in the art (general molecular biological and recombinant DNA techniques are described in Sambrook, Fritsch, and Maniatis, Molecular Cloning: A Laboratory Manual, Second Edition, Cold Spring Harbor Laboratory Press, Cold Spring Harbor, NY, 1989).

[0068] Reference: As used herein, “reference” refers to a standard or control relative to which a comparison is performed. For example, in some embodiments, an agent, sample, sequence, subject, animal, or individual, or population thereof, or a measure or characteristic representative thereof, is compared with a reference, an agent, sample, sequence, subject, animal, or individual, or population thereof, or a measure or characteristic representative thereof. In some embodiments, a reference is a measured value. In some embodiments, a reference is an established standard or expected value. In some embodiments, a reference is a historical reference. A reference can be quantitative of qualitative. Typically, as would be understood by those of skill in the art, a reference and the value to which it is compared represents measure under comparable conditions. Those of skill in the art will appreciate when sufficient similarities are present to justify reliance on and/or comparison. In some embodiments, an appropriate reference may be an agent, sample, sequence, subject, animal, or individual, or population thereof, under conditions those of skill in the art will recognize as comparable, e.g., for the purpose of assessing one or more particular variables (e.g., presence or absence of an agent or condition), or a measure or characteristic representative thereof. Without wishing to be bound by any particular embodiment(s), in various embodiments a reference sequence can be a sequence associated with a sequence accession number provided herein, certain of which sequences associated with sequence accession numbers are provided in the below listing of accession sequences.

[0069] Regulatory sequence: As used herein in the context of expression of a nucleic acid coding sequence, a regulatory sequence is a nucleic acid sequence that controls expression of a coding sequence. In some embodiments, a regulatory sequence can control or impact one or more aspects of gene expression (e.g., cell-type-specific expression, inducible expression, etc.).

[0070] Subject: As used herein, the term “subject” refers to an organism, typically a mammal (e.g., a human, rat, or mouse). In some embodiments, a subject is suffering from a disease, disorder or condition. In some embodiments, a subject is susceptible to a disease, disorder, or condition. In some embodiments, a subject displays one or more symptoms or characteristics of a disease, disorder or condition. In some embodiments, a subject is not suffering from a disease, disorder or condition. In some embodiments, a subject does not display any symptom or characteristic of a disease, disorder, or condition. In some embodiments, a subject has one or more features characteristic of susceptibility to or risk of a disease, disorder, or condition. In some embodiments, a subject is a subject that has been tested for a disease, disorder, or condition, and/or to whom therapy has been administered. In some instances, a human subject can be interchangeably referred to as a “patient” or “individual.”

[0071] Therapeutic agent: As used herein, the term “therapeutic agent” refers to any agent that elicits a desired pharmacological effect when administered to a subject. In some embodiments, an agent is considered to be a therapeutic agent if it demonstrates a statistically significant effect across an appropriate population. In some embodiments, the appropriate population can be a population of model organisms or a human population. In some embodiments, an appropriate population can be defined by various criteria, such as a certain age group, gender, genetic background, preexisting clinical conditions, etc. In some embodiments, a therapeutic agent is a substance that can be used for treatment of a disease, disorder, or condition. In some embodiments, a therapeutic agent is an agent that has been or is required to be approved by a government agency before it can be marketed for administration to humans. In some embodiments, a therapeutic agent is an agent for which a medical prescription is required for administration to humans.

[0072] Therapeutically effective amount: As used herein, “therapeutically effective amount” refers to an amount that produces the desired effect for which it is administered. In some embodiments, the term refers to an amount that is sufficient, when administered to a population suffering from or susceptible to a disease, disorder, and/or condition in accordance with a therapeutic dosing regimen, to treat the disease, disorder, and/or condition. In some embodiments, a therapeutically effective amount is one that reduces the incidence and/or severity of, and/or delays onset of, one or more symptoms of the disease, disorder, and/or condition. Those of ordinary skill in the art will appreciate that the term “therapeutically effective amount” does not in fact require successful treatment be achieved in a particular individual. Rather, a therapeutically effective amount may be that amount that provides a particular desired pharmacological response in a significant number of subjects when administered to patients in need of such treatment. In some embodiments, reference to a therapeutically effective amount may be a reference to an amount as measured in one or more specific tissues (e.g., a tissue affected by the disease, disorder or condition) or fluids (e.g., blood, saliva, serum, sweat, tears, urine, etc.). Those of ordinary skill in the art will appreciate that, in some embodiments, a therapeutically effective amount of a particular agent or therapy may be formulated and/or administered in a single dose. In some embodiments, a therapeutically effective agent may be formulated and/or administered in a plurality of doses, for example, as part of a dosing regimen.

[0073] Treatment: As used herein, the term “treatment” (also “treat” or “treating”) refers to administration of a therapy that partially or completely alleviates, ameliorates, relieves, inhibits, delays onset of, reduces severity of, and/or reduces incidence of one or more symptoms, features, and/or causes of a particular disease, disorder, or condition, or is administered for the purpose of achieving any such result. In some embodiments, such treatment can be of a subject who does not exhibit signs of the relevant disease, disorder, or condition and/or of a subject who exhibits only early signs of the disease, disorder, or condition. Alternatively or additionally, such treatment can be of a subject who exhibits one or more established signs of the relevant disease, disorder and/or condition. In some embodiments, treatment can be of a subject who has been diagnosed as suffering from the relevant disease, disorder, and/or condition. In some embodiments, treatment can be of a subject known to have one or more susceptibility factors that are statistically correlated with increased risk of development of the relevant disease, disorder, or condition. A “prophylactic treatment” includes a treatment administered to a subject who does not display signs or symptoms of a condition to be treated or displays only early signs or symptoms of the condition to be treated such that treatment is administered for the purpose of diminishing, preventing, or decreasing the risk of developing the condition. Thus, a prophylactic treatment functions as a preventative treatment against a condition. A “therapeutic treatment” includes a treatment administered to a subject who displays symptoms or signs of a condition and is administered to the subject for the purpose of reducing the severity or progression of the condition.

[0074] Unit dose: As used herein, the term “unit dose” refers to an amount administered as a single dose and/or in a physically discrete unit of a pharmaceutical composition. In many embodiments, a unit dose contains a predetermined quantity of an active agent, for instance a predetermined viral titer (the number of viruses, virions, or viral particles in a given volume). In some embodiments, a unit dose contains an entire single dose of the agent. In some embodiments, more than one unit dose is administered to achieve a total single dose. In some embodiments, administration of multiple unit doses is required, or expected to be required, in order to achieve an intended effect. A unit dose can be, for example, a volume of liquid (e.g., an acceptable carrier) containing a predetermined quantity of one or more therapeutic moieties, a predetermined amount of one or more therapeutic moieties in solid form, a sustained release formulation or drug delivery device containing a predetermined amount of one or more therapeutic moieties, etc. It will be appreciated that a unit dose can be present in a formulation that includes any of a variety of components in addition to the therapeutic moiety(s). For example, acceptable carriers (e.g., pharmaceutically acceptable carriers), diluents, stabilizers, buffers, preservatives, etc., can be included. It will be appreciated by those skilled in the art, in many embodiments, a total appropriate daily dosage of a particular therapeutic agent can include a portion, or a plurality, of unit doses, and can be decided, for example, by a medical practitioner within the scope of sound medical judgment. In some embodiments, the specific effective dose level for any particular subject or organism can depend upon a variety of factors including the disorder being treated and the severity of the disorder; activity of specific active compound employed; specific composition employed; age, body weight, general health, sex, and diet of the subject; time of administration, and rate of excretion of the specific active compound employed; duration of the treatment; drugs and/or additional therapies used in combination or coincidental with specific compound(s) employed, and like factors well known in the medical arts.

### BRIEF DESCRIPTION OF THE DRAWING

[0075] FIG. 1 is a chart showing results of anti-hexon staining of CD34+ cells three hours after infection of the cells with indicated adenoviral serotypes. Cells were infected at 5,000 viral particles per cell or 2,000 viral particles per cell. For each tested serotype, the chart includes two replicates of data, each replicate including, in the order shown, results of analysis at 5,000 viral particles per cell and 2,000 viral particles per cell. Data represent infection efficiency.

[0076] FIG. 2 is a chart showing results of qPCR analysis of adenoviral DNA in CD34+ cells infected with the indicated adenoviral serotypes. Cells were infected at 5,000 viral particles per cell or 2,000 viral particles per cell. For each tested serotype, the chart includes two replicates of data, each replicate including, in the order shown, results of analysis at 5,000 viral particles per cell and 2,000 viral particles per cell. Data represent relative infection efficiency.

[0077] FIG. 3 is a schematic of hematopoietic cell differentiation that includes hematopoietic stem cells, progenitor cells, and terminally differentiated cells.

[0078] FIG. 4 is a schematic of a plasmid containing an E1-deleted Ad5 genome including an EGFP reporter construct. The schematic depicts a single vector; however solely for the purposes of presentation, the adenoviral genome is depicted in two sections with the hexon region included in each section to indicate the orientation of the sections with respect to each other.

[0079] FIG. 5 is a schematic of a plasmid containing an E1-deleted Ad7 genome including an EGFP reporter construct. The schematic depicts a single vector; however solely for the purposes of presentation, the adenoviral genome is depicted in two sections with the hexon region included in each section to indicate the orientation of the sections with respect to each other.

[0080] FIG. 6 is a schematic of a plasmid containing an E1-deleted Ad11 genome including an EGFP reporter construct. The schematic depicts a single vector; however solely for the purposes of presentation, the adenoviral genome is depicted in two sections with the hexon region included in each section to indicate the orientation of the sections with respect to each other.

[0081] FIG. 7 is a schematic of a plasmid containing an E1-deleted Ad16 genome including an EGFP reporter construct. The schematic depicts a single vector; however solely for the purposes of presentation, the adenoviral genome is depicted in two sections with the hexon region included in each section to indicate the orientation of the sections with respect to each other.

[0082] FIG. 8 is a schematic of a plasmid containing an E1-deleted Ad34 genome including an EGFP reporter construct. The schematic depicts a single vector; however solely for the purposes of presentation, the adenoviral genome is depicted in two sections with the hexon region included in each section to indicate the orientation of the sections with respect to each other.

[0083] FIG. 9 is a schematic of a plasmid containing an E1-deleted Ad35 genome including an EGFP reporter construct. The schematic depicts a single vector; however solely for the purposes of presentation, the adenoviral genome is depicted in two sections with the hexon region included in each section to indicate the orientation of the sections with respect to each other.

[0084] FIG. 10 is a schematic of a plasmid containing an E1-deleted Ad35++ genome including an EGFP reporter construct. The schematic depicts a single vector; however solely for the purposes of presentation, the adenoviral genome is depicted in two sections with the hexon region included in each section to indicate the orientation of the sections with respect to each other.

[0085] FIG. 11 is an exemplary depiction of gating used for analysis of monocyte, T cell, NK cell, and B cell populations present in PBMCs using flow cytometry. Boxes indicate gates used to define cell types. Arrows from one plot to another indicate that the gated population in the first plot is being displayed in the second plot. The representative data shown in this figure corresponds to human PBMCs, 48 hours after infection with an E1-deleted adenoviral vector of the present disclosure at an MOI of 2000 viral particles per cell.

[0086] FIG. 12 is a chart showing results of GFP analysis of monocytes present in human PBMCs from Donor 1, 48 hours after infection of the cells with E1-deleted adenoviral vectors of the indicated adenoviral serotypes. Monocytes were identified as CD14+/CD11b+ myeloid cells. Percent of cells that are GFP positive is shown. Cells were infected at an MOI of 500, 2000, and 5000 viral particles per cell. At each MOI, data is shown for Ad5, Ad7, Ad11, Ad34, Ad35, Ad35++, and Ad16 (from left to right). Data represents infection efficiency.

[0087] FIG. 13 is a chart showing results of GFP analysis of T cells present in human PBMCs from Donor 1, 48 hours after infection of the cells with E1-deleted adenoviral vectors of the indicated adenoviral serotypes. T cells were identified as CD3+ lymphoid cells. Percent of cells that are GFP positive is shown. Cells were infected at an MOI of 500, 2000, and 5000 viral particles per cell. At each MOI, data is shown for Ad5, Ad7, Ad11, Ad34, Ad35, Ad35++, and Ad16 (from left to right). Data represents infection efficiency.

[0088] FIG. 14 is a chart showing results of GFP analysis of NK cells present in human PBMCs from Donor 1, 48 hours after infection of the cells with E1-deleted adenoviral vectors of the indicated adenoviral serotypes. NK cells were identified as CD3−/CD56+ lymphoid cells. Percent of cells that are GFP positive is shown. Cells were infected at an MOI of 500, 2000, and 5000 viral particles per cell. At each MOI, data is shown for Ad5, Ad7, Ad11, Ad34, Ad35, Ad35++, and Ad16 (from left to right). Data represents infection efficiency.

[0089] FIG. 15 is a chart showing results of GFP analysis of B cells present in human PBMCs from Donor 1, 48 hours after infection of the cells with E1-deleted adenoviral vectors of the indicated adenoviral serotypes. B cells were identified as CD20+ lymphoid cells. Percent of cells that are GFP positive is shown. Cells were infected at an MOI of 500, 2000, and 5000 viral particles per cell. At each MOI, data is shown for Ad5, Ad7, Ad11, Ad34, Ad35, Ad35++, and Ad16 (from left to right). Data represents infection efficiency.

[0090] FIG. 16 is a chart showing results of GFP analysis of monocytes present in human PBMCs from Donor 2, 48 hours after infection of the cells with E1-deleted adenoviral vectors of the indicated adenoviral serotypes. Monocytes were identified as CD14+/CD11b+ myeloid cells. Percent of cells that are GFP positive is shown. Cells were infected at an MOI of 500, 2000, and 5000 viral particles per cell. At each MOI, data is shown for Ad5, Ad7, Ad11, Ad34, Ad35, and Ad35++ (from left to right). Data represents infection efficiency.

[0091] FIG. 17 is a chart showing results of GFP analysis of T cells present in human PBMCs from Donor 2, 48 hours after infection of the cells with E1-deleted adenoviral vectors of the indicated adenoviral serotypes. T cells were identified as CD3+ lymphoid cells. Percent of cells that are GFP positive is shown. Cells were infected at an MOI of 500, 2000, and 5000 viral particles per cell. At each MOI, data is shown for Ad5, Ad7, Ad1, Ad34, Ad35, and Ad35++ (from left to right). Data represents infection efficiency.

[0092] FIG. 18 is a chart showing results of GFP analysis of NK cells present in human PBMCs from Donor 2, 48 hours after infection of the cells with E1-deleted adenoviral vectors of the indicated adenoviral serotypes. NK cells were identified as CD3−/CD56+ lymphoid cells. Percent of cells that are GFP positive is shown. Cells were infected at an MOI of 500, 2000, and 5000 viral particles per cell. At each MOI, data is shown for Ad5, Ad7, Ad11, Ad34, Ad35, and Ad35++ (from left to right). Data represents infection efficiency.

[0093] FIG. 19 is a chart showing results of GFP analysis of B cells present in human PBMCs from Donor 2, 48 hours after infection of the cells with E1-deleted adenoviral vectors of the indicated adenoviral serotypes. B cells were identified as CD20+ lymphoid cells. Percent of cells that are GFP positive is shown. Cells were infected at an MOI of 500, 2000, and 5000 viral particles per cell. At each MOI, data is shown for Ad5, Ad7, Ad1, Ad34, Ad35, and Ad35++ (from left to right). Data represents infection efficiency.

### DETAILED DESCRIPTION

[0094] The present disclosure includes compositions and methods for selective targeting of hematopoietic cells (e.g., one or more particular types of hematopoietic cells). In particular, the present disclosure includes viral vectors that selective target one or more types of hematopoietic cells. In various embodiments, a viral vector that selectively targets one or more types of hematopoietic cells is an adenoviral vector of the present disclosure, e.g., an Ad3, 5, 7, 11, 14, 16, 21, 34, 35, 37, or 50 vector as disclosed herein. Various types of hematopoietic stem cells that can be targeted by vectors of the present disclosure are disclosed herein, including hematopoietic stem cell types, hematopoietic progenitor cell types, and further differentiated hematopoietic cell types including without limitation terminally differentiated hematopoietic cell types.

[0095] Hematopoiesis refers to the process by which various types of blood cells are produced. Because diverse cell types derive from hematopoietic stem and progenitor cells (HSPCs) through a process of differentiation, hematopoiesis is sometimes presented as a hierarchy. Hematopoietic stem cells (HSCs) are positioned at the “top” of this hierarchy (see FIG. 3). Without wishing to be bound by any particular scientific theory, HSCs are understood to be self-renewing and multipotent, differentiating into progenitors that further differentiate to produce mature and/or terminally differentiated blood cells. Stages of differentiation are disclosed herein (including, e.g., in FIG. 3), where further differentiation refers to increasing differentiation relative to an HSC or other temporally prior state and/or further change away from an HSC state as set forth in a differentiation lineage set forth in FIG. 3 or otherwise disclosed herein. According to some estimates, an adult human can include tens of thousands of HSCs, giving rise to hundreds of millions of progenitor cells that differentiate into precursor cells and eventually mature effector cells. Thus, a population of multipotent self-renewing HSCs generates large numbers of differentiated progeny by amplification and progressive lineage restriction. As referred to herein, hematopoietic cell types refer to any and all types of cells that are or derive from hematopoietic stem cells and/or hematopoietic progenitor cells, including without limitation particular cell types disclosed herein.

[0096] Without wishing to be bound by any particular scientific theory, HSCs can be divided into two subpopulations according to their CD34 expression: CD34⁺ long-term (LT)-HSCs and CD34⁺ short-term (ST)-HSCs. L-HSCs differentiate into ST-HSCs, and subsequently, ST-HSCs differentiate into multipotent progenitors (MPPs). In various embodiments, a hematopoietic cell type is or includes CD34⁺ hematopoietic cells.

[0097] Without wishing to be bound by any particular scientific theory, progenitors are understood to lack the capacity for self-renewal and are characterized by restricted differentiation, in that they can only yield cells of a particular lineage. Progenitors can be myeloid lineage progenitors or lymphoid lineage progenitors (referred to respectively as common myeloid progenitors (CMPs) and common lymphoid progenitors (CLPs)).

[0098] CMPs can differentiate into granulocyte-macrophage progenitors (GMPs) and megakaryocyte-erythrocyte progenitors (MEPs). GMPs can differentiate into granulocytes (e.g., neutrophils, eosinophils, and basophils), and monocytes (which can differentiate into to macrophages). MEPs can differentiate into megakaryocytes/platelets and erythrocytes. CLPs can differentiate into T, NK, and B cells.

[0099] Hematopoiesis further includes cell types that are referred to by names that are based on their identification in colony forming unit assays. Cells that form hematopoietic colonies (so-called CFUs or CFCs) can represent steps or stages of hematopoietic differentiation between HSCs and more terminally differentiated cells. CFUs can be identified by culturing hematopoietic cells in a semisolid media (typically methylcellulose or agar) supplemented with cytokines that promote the localized expansion and differentiation of hematopoietic cells in discrete colonies. CFUs can be identified by factors including, without limitation, the number of cells in a colony, the time required to produce the colony, and/or the types of cells in the colony. In general, without wishing to be bound by any particular scientific theory, progenitor cells can produce colonies that include, e.g., at least 30,000 cells including cell types of multiple lineages, e.g., by day 15-18 of culture. In various embodiments, culturing can produce colonies that generate erythroid bursts (e.g., of 5,000 cells), referred to as burst-forming unit erythroid (BFU-E). Other colony types can include granulomonocytic colonies (colony forming unit, granulomonocytic (CFU-GM)) and colonies of, e.g., 50-200 cells that are erythroid cells (colony-forming unit, erythroid (CFU-E)), granulocytic cells (CFU-G), or monocytic cells (CFU-M). These descriptions of colonies are solely for general illustration, and methods and techniques for colony analysis and identification are known in the art.

[0100] CLPs can also be referred to as CFU-L cells. In various embodiments, CFU-L cells can differentiate into CFU-B cells that differentiate into Pre-B Lymphocytes that can differentiate into B Lymphoblasts and subsequently into B Lymphocytes. In various embodiments, CFU-L cells can differentiate into CFU-T cells that differentiate into Pre-T Lymphocytes that can differentiate into T Lymphoblasts and subsequently into T Lymphocytes.

[0101] CMPs can also be referred to as CFU-GEMM cells. GMPs can also be referred to as CFU-GM cells. In various embodiments, CFU-GM cells can differentiate into CFU-M cells that differentiate into monoblasts and CFU-G cells that differentiate into neutrophils (e.g., via myeloblasts and neutrophilic myelocytes). MEPs can differentiate into BFU-E cells that can differentiate into CFU-E cells that can differentiate into erythroblasts (e.g., via rubriblasts, rubricytes, and metarubricytes). MEPs can differentiate into CFU-Mk cells that differentiate into megakaryocytes. CFU-Gemm can also differentiate into CFU-Eo cells that differentiate into eosinophils (e.g., via myeloblasts and eosinophilic myelocytes) and CFU-Baso cells that differentiate into basophils (e.g., via myeloblasts and basophilic myelocytes). Megakaryocyte lineage progenitors can include BFU-MK cells that differentiate into more mature progenitor cells referred to as CFU-MK cells.

[0102] HSC self-renewal and hematopoietic differentiation are controlled by multiple positive and negative regulatory elements, the mechanisms of which are poorly understood. Both intrinsic and extrinsic factors are likely involved, including for example epigenetic and microenvironmental factors, as well as intrinsic transcription factors (TFs) and extrinsic cytokines that contribute to stepwise differentiation of HSCs to mature blood cells.

[0103] Various means of identifying hematopoietic cell types are known in the art.

[0104] The present disclosure includes the recognition that gene therapy selectively targeting hematopoietic stem cells can be useful for long-term, transmissible modification of hematopoietic cells. The present disclosure includes the recognition that gene therapy selectively targeting hematopoietic progenitor cells can be useful for long-term, transmissible modification of hematopoietic cells. The present disclosure includes the recognition that gene therapy selectively targeting hematopoietic cells that are not stem cells and/or are not progenitor cells (e.g., terminally differentiated cells) can be useful for rapid therapeutic impact on one or more target cell types. For example, in various embodiments, differentiated cells can have more immediate effect because they do not require time to differentiate into effector cells. The present disclosure includes the recognition that gene therapy selectively targeting hematopoietic cells that are not stem cells and/or are not progenitor cells (e.g., terminally differentiated cells) can be useful for transient modification of a target cell type population. For example, in various embodiments, differentiated cells do not produce or constitute a long-term reservoir. The present disclosure includes the recognition that gene therapy selectively targeting hematopoietic cells that are not stem cells and/or are not progenitor cells (e.g., terminally differentiated cells) can be useful for target cell type-specific modification. For example, in various embodiments, differentiated cells do not produce cells of multiple lineages. The present disclosure includes the recognition that gene therapy selectively targeting hematopoietic cells that are not stem cells and/or are not progenitor cells (e.g., terminally differentiated cells) can be useful to minimize the targeting of a plurality of different cell types and thereby minimize risk of complications such as genotoxicity.

[0105] The present disclosure provides methods and compositions that include adenoviral vectors advantageous for gene therapy targeting hematopoietic cells (e.g., one or more particular types of hematopoietic cells). Methods and compositions of the present disclosure are based at least in part on the observation that adenoviral vectors of Ad3, Ad5, Ad7, Ad11, Ad14, Ad16, Ad21, Ad34, Ad35, Ad37, and Ad50 serotypes demonstrate certain advantageous properties for gene therapy targeting hematopoietic cells (e.g., one or more particular types of hematopoietic cells), at least as compared to one or more reference adenoviral vectors (e.g., an Ad5 vector or an Ad5/35 vector). Adenovirus (or, interchangeably, “adenoviral”) vectors include virus particles characterized by one or more adenoviral protein sequences and optionally include an adenoviral genome. Adenoviral genomes include nucleic acid sequences that include adenoviral sequences sufficient to (a) support packaging of the nucleic acid sequence (including conditional packaging) into an adenoviral vector and to (b) express a coding sequence. Adenoviral genomes can be linear, double-stranded DNA sequences and/or molecules. As those of skill in the art will appreciate, a linear genome such as an adenoviral genome can be present in a circular plasmid, e.g., for viral production purposes. Natural adenoviral genomes range from 26 kb to 45 kb in length, depending on the serotype.

[0106] The present disclosure includes methods and compositions that include engineered adenoviral vectors and adenoviral genomes. Adenoviral vectors include engineered adenoviral vectors that include an engineered adenoviral protein or engineered adenoviral genome. Engineered adenoviral genomes can be engineered to add or remove adenoviral genome sequences, e.g., as compared to a reference sequence.

[0107] In various embodiments, adenoviral serotypes and/or vectors of the present disclosure demonstrate increased infection of one or more hematopoietic cell type(s) as compared to infection of the hematopoietic cell type(s) by one or more reference adenoviral serotypes and/or vectors (e.g., Ad5 and/or Ad5/35), and are therefore useful, e.g., for targeting the hematopoietic cell type(s) for therapeutic purposes. In various embodiments, adenoviral serotypes and/or vectors of the present disclosure demonstrate increased infection of one or more hematopoietic cell type(s) as compared to infection of one or more reference hematopoietic cell type(s) by the same serotype and/or vector, and are therefore useful, e.g., for targeting the hematopoietic cell type(s) for therapeutic purposes. Methods and compositions of the present disclosure included adenoviral vectors of serotypes Ad3, Ad5, Ad7, Ad11, Ad14, Ad16, Ad21, Ad34, Ad35, Ad37, and Ad50.

### I. Gene Therapy Vectors

### 1(A). Adenoviral Vectors

[0108] The present disclosure includes adenoviral vectors and adenoviral genomes useful in gene therapy. Adenoviruses are large, icosahedral-shaped, non-enveloped viruses. Natural adenoviral capsids include three types of proteins: fiber, penton, and hexon. The hexon makes up the majority of the viral capsid, forming 20 triangular faces. A penton base is located at each of the 12 vertices of the capsid, and a fiber (also referred to as knobbed fiber) protrudes from each penton base. Penton and fiber, and in particular the fiber knob, are of particular importance in receptor binding and internalization as they facilitate the attachment of the capsid to host cells.

[0109] Adenoviral genomes include Adenoviral DNA flanked on both ends by serotype-specific inverted terminal repeats (ITRs), which are understood to be cis elements that contribute to or are necessary for viral genome replication and packaging. Depending on the serotype, ITRs can be approximately 100-200 base pairs (e.g., about 160 base pairs) in length, with highest conservation at nucleotide positions (e.g., ˜50 base pairs) closest to the adenoviral genome terminii. Adenoviral genomes also include a packaging sequence (e.g., a conditional or non-conditional packaging sequence), which can facilitate packaging of the viral genome into viral vectors. Packaging sequences are located in the left portion of the genome.

[0110] Natural adenoviral genomes encode several proteins including early transcriptional units, E1, E2, E3, and E4 and late transcriptional units which encode structural protein components of the adenoviral vector. Early (E) and late (L) transcription are divided by the onset of viral genome replication. The E1 region (E1A and E1B) encodes proteins responsible for the regulation of transcription of the viral genome. The expression of the E2 region (E2A and E2B) results in the synthesis of the proteins for viral genome replication. These proteins are involved in DNA replication, late gene expression, and host cell shut-off. The products of the late genes, including the majority of the viral capsid proteins, are expressed only after significant processing of a single primary transcript issued by the major late promoter (MLP). The MLP is particularly efficient during the late phase of infection. mRNAs transcribed using this promoter can include a 5′-tripartite leader (TPL) sequence that facilitates translation.

### 1(B). Ad3, 5, 7, 11, 14, 16, 21, 34, 35, 37, and 50 Gene Therapy Vectors

[0111] The present disclosure includes Ad3, 5, 7, 11, 14, 16, 21, 34, 35, 37, or 50 genomes. In various embodiments, an Ad3, 5, 7, 11, 14, 16, 21, 34, 35, 37, or 50 genome is a single-stranded or double-stranded DNA sequence that includes ITRs of an Ad3, 5, 7, 11, 14, 16, 21, 34, 35, 37, or 50 vector (e.g., a 5′ ITR according to SEQ ID NO: 1, 19, 37, 55, 73, 91, 109, 127, 145, 163, or 181 and a 3′ ITR according to SEQ ID NO: 2, 20, 38, 56, 74, 92, 110, 128, 146, 164, or 182), or ITRs that individually and/or together have at least 75% sequence identity (e.g., at least 75%, 80%, 85%, 90%, 95%, 96%, 97%, 98%, 99%, or 100% identity) thereto. In various embodiments, an Ad3, 5, 7, 11, 14, 16, 21, 34, 35, 37, or 50 genome is a single-stranded or double-stranded DNA sequence that includes a packaging sequence of an Ad3, 5, 7, 11, 14, 16, 21, 34, 35, 37, or 50 vector (e.g., a packaging sequence according to SEQ ID NO: 3, 21, 39, 57, 75, 93, 111, 129, 147, 165, or 183), or a packaging sequence having at least 75% sequence identity (e.g., at least 75%, 80%, 85%, 90%, 95%, 96%, 97%, 98%, 99%, or 100% identity) to the entirety or a portion thereof. In various embodiments, an Ad3, 5, 7, 11, 14, 16, 21, 34, 35, 37, or 50 genome is a single-stranded or double-stranded DNA sequence that includes a sequence with at least 75% sequence identity (e.g., at least 75%, 80%, 85%, 90%, 95%, 96%, 97%, 98%, 99%, or 100% identity) to all, a portion of, or a contiguous corresponding portion of, or a discontiguous corresponding portion of a reference Ad3, 5, 7, 11, 14, 16, 21, 34, 35, 37, or 50 genome (e.g., SEQ ID NO: 199, 200, 201, 202, 203, 204, 205, 206, 207, 208, or 209).

[0112] In various embodiments, an Ad3, 5, 7, 11, 14, 16, 21, 34, 35, 37, or 50 genome is any nucleotide sequence that includes at least ITRs of an Ad3, 5, 7, 11, 14, 16, 21, 34, 35, 37, or 50 vector (e.g., a 5′ ITR according to SEQ ID NO: 1, 19, 37, 55, 73, 91, 109, 127, 145, 163, or 181 and a 3′ ITR according to SEQ ID NO: 2, 20, 38, 56, 74, 92, 110, 128, 146, 164, or 182), or ITRs that individually and/or together have at least 75% sequence identity (e.g., at least 75%, 80%, 85%, 90%, 95%, 96%, 97%, 98%, 99%, or 100% identity) thereto. In various embodiments, an Ad3, 5, 7, 11, 14, 16, 21, 34, 35, 37, or 50 genome is an Ad3, 5, 7, 11, 14, 16, 21, 34, 35, 37, or 50 genome from which one or more nucleotides, coding sequences, and/or genes are completely or partially deleted as compared to a reference sequence. For example, in some embodiments, an Ad3, 5, 7, 11, 14, 16, 21, 34, 35, 37, or 50 genome can be a genome that does not include one or more of E1, E2, E3, and E4. In certain embodiments, an Ad3, 5, 7, 11, 14, 16, 21, 34, 35, 37, or 50 genome is a genome that does not include any coding sequences of an Ad3, 5, 7, 11, 14, 16, 21, 34, 35, 37, or 50 genome (e.g., a “gutless” vector that includes ITRs having at least 75% sequence identity to Ad3, 5, 7, 11, 14, 16, 21, 34, 35, 37, or 50 genome ITRs but includes none of the coding sequences present in a reference Ad3, 5, 7, 11, 14, 16, 21, 34, 35, 37, or 50 genome).

[0113] In various embodiments, an Ad3, 5, 7, 11, 14, 16, 21, 34, 35, 37, or 50 genome includes, does not include, or includes a deletion of, all or a portion of an E1 sequence according to SEQ ID NO: 4, 22, 40, 58, 76, 94, 112, 130, 148, 166, or 184, or a sequence having at least 75% sequence identity (e.g., at least 75%, 80%, 85%, 90%, 95%, 96%, 97%, 98%, 99%, or 100% identity) thereto.

[0114] In various embodiments, an Ad3, 5, 7, 11, 14, 16, 21, 34, 35, 37, or 50 genome includes, does not include, or includes a deletion of, all or a portion of an E2 sequence according to SEQ ID NO: 5, 23, 41, 59, 77, 95, 113, 131, 149, 167, or 185, or a sequence having at least 75% sequence identity (e.g., at least 75%, 80%, 85%, 90%, 95%, 96%, 97%, 98%, 99%, or 100% identity) thereto.

[0115] In various embodiments, an Ad3, 5, 7, 11, 14, 16, 21, 34, 35, 37, or 50 genome includes, does not include, or includes a deletion of, all or a portion of an E3 sequence according to SEQ ID NO: 6, 24, 42, 60, 78, 96, 114, 132, 150, 168, or 186, or a sequence having at least 75% sequence identity (e.g., at least 75%, 80%, 85%, 90%, 95%, 96%, 97%, 98%, 99%, or 100% identity) thereto.

[0116] In various embodiments, an Ad3, 5, 7, 11, 14, 16, 21, 34, 35, 37, or 50 genome includes, or does not include, a sequence that encodes a fiber, where the sequence has at least 75% sequence identity (e.g., at least 75%, 80%, 85%, 90%, 95%, 96%, 97%, 98%, 99%, or 100% identity) to SEQ ID NO: 7, 25, 43, 61, 79, 97, 115, 133, 151, 169, or 187.

[0117] In various embodiments, an Ad3, 5, 7, 11, 14, 16, 21, 34, 35, 37, or 50 genome includes, or does not include, a sequence that encodes a fiber shaft, where the sequence has at least 75% sequence identity (e.g., at least 75%, 80%, 85%, 90%, 95%, 96%, 97%, 98%, 99%, or 100% identity) to SEQ ID NO: 9, 27, 45, 63, 81, 99, 117, 135, 153, 171, or 189.

[0118] In various embodiments, an Ad3, 5, 7, 11, 14, 16, 21, 34, 35, 37, or 50 genome includes, or does not include, a sequence that encodes a fiber knob, where the sequence has at least 75% sequence identity (e.g., at least 75%, 80%, 85%, 90%, 95%, 96%, 97%, 98%, 99%, or 100% identity) to SEQ ID NO: 10, 28, 46, 64, 82, 100, 118, 136, 154, 172, or 190.

[0119] In various embodiments, an Ad3, 5, 7, 11, 14, 16, 21, 34, 35, 37, or 50 genome includes, or does not include, a sequence that encodes a fiber tail, where the sequence has at least 75% sequence identity (e.g., at least 75%, 80%, 85%, 90%, 95%, 96%, 97%, 98%, 99%, or 100% identity) to SEQ ID NO: 8, 26, 44, 62, 80, 98, 116, 134, 152, 170, or 188.

[0120] In various embodiments, an Ad3, 5, 7, 11, 14, 16, 21, 34, 35, 37, or 50 genome includes, or does not include, a sequence that encodes a penton, where the sequence has at least 75% sequence identity (e.g., at least 75%, 80%, 85%, 90%, 95%, 96%, 97%, 98%, 99%, or 100% identity) to SEQ ID NO: 11, 29, 47, 65, 83, 101, 119, 137, 155, 173, or 191.

[0121] In various embodiments, an Ad3, 5, 7, 11, 14, 16, 21, 34, 35, 37, or 50 genome includes, or does not include, a sequence that encodes a hexon, where the sequence has at least 75% sequence identity (e.g., at least 75%, 80%, 85%, 90%, 95%, 96%, 97%, 98%, 99%, or 100% identity) to SEQ ID NO: 12, 30, 48, 66, 84, 102, 120, 138, 156, 174, or 192.

[0122] The present disclosure includes Ad3, 5, 7, 11, 14, 16, 21, 34, 35, 37, or 50 vectors that include a fiber having at least 75% sequence identity (e.g., at least 75%, 80%, 85%, 90%, 95%, 96%, 97%, 98%, 99%, or 100% identity) to an Ad3, 5, 7, 11, 14, 16, 21, 34, 35, 37, or 50 fiber (e.g., a fiber according to SEQ ID NO: 13, 31, 49, 67, 85, 103, 121, 139, 157, 175, or 193).

[0123] The present disclosure includes Ad3, 5, 7, 11, 14, 16, 21, 34, 35, 37, or 50 vectors that include a fiber tail having at least 75% sequence identity (e.g., at least 75%, 80%, 85%, 90%, 95%, 96%, 97%, 98%, 99%, or 100% identity) to an Ad3, 5, 7, 11, 14, 16, 21, 34, 35, 37, or 50 fiber tail (e.g., a fiber tail according to SEQ ID NO: 18, 36, 54, 72, 90, 108, 126, 144, 162, 180, or 198, e.g., where the fiber tail is the portion of the fiber including all amino acids N-terminal to the fiber shaft).

[0124] The present disclosure includes Ad3, 5, 7, 11, 14, 16, 21, 34, 35, 37, or 50 vectors that include a fiber shaft having at least 75% sequence identity (e.g., at least 75%, 80%, 85%, 90%, 95%, 96%, 97%, 98%, 99%, or 100% identity) to an Ad3, 5, 7, 11, 14, 16, 21, 34, 35, 37, or 50 fiber shaft (e.g., a fiber shaft according to SEQ ID NO: 14, 32, 50, 68, 86, 104, 122, 140, 158, 176, or 194).

[0125] The present disclosure includes Ad3, 5, 7, 11, 14, 16, 21, 34, 35, 37, or 50 vectors that include a fiber knob having at least 75% sequence identity (e.g., at least 75%, 80%, 85%, 90%, 95%, 96%, 97%, 98%, 99%, or 100% identity) to an Ad3, 5, 7, 11, 14, 16, 21, 34, 35, 37, or 50 fiber knob (e.g., a fiber knob according to SEQ ID NO: 15, 33, 51, 69, 87, 105, 123, 141, 159, 177, or 195).

[0126] The present disclosure includes Ad3, 5, 7, 11, 14, 16, 21, 34, 35, 37, or 50 vectors that include a penton having at least 75% sequence identity (e.g., at least 75%, 80%, 85%, 90%, 95%, 96%, 97%, 98%, 99%, or 100% identity) to an Ad3, 5, 7, 11, 14, 16, 21, 34, 35, 37, or 50 penton (e.g., a penton according to SEQ ID NO: 16, 34, 52, 70, 88, 106, 124, 142, 160, 178, or 196).

[0127] The present disclosure includes Ad3, 5, 7, 11, 14, 16, 21, 34, 35, 37, or 50 vectors that include a hexon having at least 75% sequence identity (e.g., at least 75%, 80%, 85%, 90%, 95%, 96%, 97%, 98%, 99%, or 100% identity) to an Ad3, 5, 7, 11, 14, 16, 21, 34, 35, 37, or 50 hexon (e.g., a hexon according to SEQ ID NO: 17, 35, 53, 71, 89, 107, 125, 143, 161, 179, or 197).

[0128] In various embodiments, an Ad3, 5, 7, 11, 14, 16, 21, 34, 35, 37, or 50 vector is any adenoviral vector that includes at least a fiber having at least 75% sequence identity (e.g., at least 75%, 80%, 85%, 90%, 95%, 96%, 97%, 98%, 99%, or 100% identity) to an Ad3, 5, 7, 11, 14, 16, 21, 34, 35, 37, or 50 fiber (e.g., a fiber according to SEQ ID NO: 13, 31, 49, 67, 85, 103, 121, 139, 157, 175, or 193).

[0129] In various embodiments, an Ad3, 5, 7, 11, 14, 16, 21, 34, 35, 37, or 50 vector is any adenoviral vector that includes at least a fiber tail having at least 75% sequence identity (e.g., at least 75%, 80%, 85%, 90%, 95%, 96%, 97%, 98%, 99%, or 100% identity) to an Ad3, 5, 7, 11, 14, 16, 21, 34, 35, 37, or 50 fiber tail (e.g., a fiber tail according to SEQ ID NO: 18, 36, 54, 72, 90, 108, 126, 144, 162, 180, or 198, e.g., where the fiber tail is the portion of the fiber including all amino acids N-terminal to the fiber shaft).

[0130] In various embodiments, an Ad3, 5, 7, 11, 14, 16, 21, 34, 35, 37, or 50 vector is any adenoviral vector that includes at least a fiber shaft having at least 75% sequence identity (e.g., at least 75%, 80%, 85%, 90%, 95%, 96%, 97%, 98%, 99%, or 100% identity) to an Ad3, 5, 7, 11, 14, 16, 21, 34, 35, 37, or 50 fiber shaft (e.g., a fiber shaft according to SEQ ID NO: 14, 32, 50, 68, 86, 104, 122, 140, 158, 176, or 194).

[0131] In various embodiments, an Ad3, 5, 7, 11, 14, 16, 21, 34, 35, 37, or 50 vector is any adenoviral vector that includes at least a fiber knob having at least 75% sequence identity (e.g., at least 75%, 80%, 85%, 90%, 95%, 96%, 97%, 98%, 99%, or 100% identity) to an Ad3, 5, 7, 11, 14, 16, 21, 34, 35, 37, or 50 fiber knob (e.g., a fiber knob according to SEQ ID NO: 15, 33, 51, 69, 87, 105, 123, 141, 159, 177, or 195).

[0132] In various embodiments, an Ad3, 5, 7, 11, 14, 16, 21, 34, 35, 37, or 50 vector is any adenoviral vector that includes at least a penton having at least 75% sequence identity (e.g., at least 75%, 80%, 85%, 90%, 95%, 96%, 97%, 98%, 99%, or 100% identity) to an Ad3, 5, 7, 11, 14, 16, 21, 34, 35, 37, or 50 penton (e.g., a penton according to SEQ ID NO: 16, 34, 52, 70, 88, 106, 124, 142, 160, 178, or 196).

[0133] In various embodiments, an Ad3, 5, 7, 11, 14, 16, 21, 34, 35, 37, or 50 vector is any adenoviral vector that includes at least a hexon having at least 75% sequence identity (e.g., at least 75%, 80%, 85%, 90%, 95%, 96%, 97%, 98%, 99%, or 100% identity) to an Ad3, 5, 7, 11, 14, 16, 21, 34, 35, 37, or 50 hexon (e.g., a hexon according to SEQ ID NO: 17, 35, 53, 71, 89, 107, 125, 143, 161, 179, or 197).

[0134] Thus, an Ad3, 5, 7, 11, 14, 16, 21, 34, 35, 37, or 50 vector can be a chimeric adenoviral vector that includes at least a fiber knob having at least 75% sequence identity (e.g., at least 75%, 80%, 85%, 90%, 95%, 96%, 97%, 98%, 99%, or 100% identity) to an Ad3, 5, 7, 11, 14, 16, 21, 34, 35, 37, or 50 fiber knob and at least one protein or portion thereof (such as a fiber shaft, fiber tail, penton, or hexon) that has at least 75% sequence identity (e.g., at least 75%, 80%, 85%, 90%, 95%, 96%, 97%, 98%, 99%, or 100% identity) to a different adenoviral serotype.

[0135] An Ad3, 5, 7, 11, 14, 16, 21, 34, 35, 37, or 50 vector can be a chimeric adenoviral vector that includes at least a fiber shaft having at least 75% sequence identity (e.g., at least 75%, 80%, 85%, 90%, 95%, 96%, 97%, 98%, 99%, or 100% identity) to an Ad3, 5, 7, 11, 14, 16, 21, 34, 35, 37, or 50 fiber shaft and at least one protein or portion thereof (such as a fiber knob, fiber tail, penton, or hexon) that has at least 75% sequence identity (e.g., at least 75%, 80%, 85%, 90%, 95%, 96%, 97%, 98%, 99%, or 100% identity) to a different adenoviral serotype.

[0136] An Ad3, 5, 7, 11, 14, 16, 21, 34, 35, 37, or 50 vector can be a chimeric adenoviral vector that includes at least a fiber tail having at least 75% sequence identity (e.g., at least 75%, 80%, 85%, 90%, 95%, 96%, 97%, 98%, 99%, or 100% identity) to an Ad3, 5, 7, 11, 14, 16, 21, 34, 35, 37, or 50 fiber tail and at least one protein or portion thereof (such as a fiber knob, fiber shaft, penton, or hexon) that has at least 75% sequence identity (e.g., at least 75%, 80%, 85%, 90%, 95%, 96%, 97%, 98%, 99%, or 100% identity) to a different adenoviral serotype.

[0137] An Ad3, 5, 7, 11, 14, 16, 21, 34, 35, 37, or 50 vector can be a chimeric adenoviral vector that includes at least a penton having at least 75% sequence identity (e.g., at least 75%, 80%, 85%, 90%, 95%, 96%, 97%, 98%, 99%, or 100% identity) to an Ad3, 5, 7, 11, 14, 16, 21, 34, 35, 37, or 50 penton and at least one protein or portion thereof (such as a fiber knob, fiber shaft, fiber tail, or hexon) that has at least 75% sequence identity (e.g., at least 75%, 80%, 85%, 90%, 95%, 96%, 97%, 98%, 99%, or 100% identity) to a different adenoviral serotype.

[0138] An Ad3, 5, 7, 11, 14, 16, 21, 34, 35, 37, or 50 vector can be a chimeric adenoviral vector that includes at least a hexon having at least 75% sequence identity (e.g., at least 75%, 80%, 85%, 90%, 95%, 96%, 97%, 98%, 99%, or 100% identity) to an Ad3, 5, 7, 11, 14, 16, 21, 34, 35, 37, or 50 hexon and at least one protein or portion thereof (such as a fiber knob, fiber shaft, fiber tail, or penton) that has at least 75% sequence identity (e.g., at least 75%, 80%, 85%, 90%, 95%, 96%, 97%, 98%, 99%, or 100% identity) to a different adenoviral serotype.

[0139] Exemplary sequences of Ad3, 5, 7, 11, 14, 16, 21, 34, 35, 37, or 50 components (e.g., ITRs, packaging sequences, genes, and proteins) are provided in the following tables. Viral polypeptides include proteins that are components of viral vectors and portions or fragments thereof, including for example a fiber, fiber knob, fiber shaft, fiber tail, penton, or hexon.

[0140] In various embodiments, an Ad35 fiber knob of an Ad35 vector or chimeric Ad vector that includes an Ad35 fiber knob is a mutant Ad35 fiber knob. In particular embodiments, a mutant Ad35 fiber knob is an Ad35++ mutant fiber knob (alternatively referred to herein as an Ad35++ fiber knob). In various embodiments, an Ad35++ mutant fiber knob is an Ad35 fiber knob mutated to increase the affinity to CD46, e.g., by 25-fold, e.g., such that the Ad35++ mutant fiber knob increases cell transduction efficiency, e.g., at lower multiplicity of infection (MOI) (Li and Lieber, FEBS Letters, 593(24): 3623-3648, 2019). In various embodiments, an Ad35++ mutant fiber knob includes at least one mutation selected from Ile192Val, Asp207Gly (or Glu207Gly in certain Ad35 sequences), Asn217Asp, Thr226Ala, Thr245Ala, Thr254Pro, Ile256Leu, Ile256Val, Arg259Cys, and Arg279His. In various embodiments, an Ad35++ mutant fiber knob includes each of the following mutations: Ile192Val, Asp207Gly (or Glu207Gly in certain Ad35 sequences), Asn217Asp, Thr226Ala, Thr245Ala, Thr254Pro, Ile256Leu, Ile256Val, Arg259Cys, and Arg279His. In various embodiments, amino acid numbering of an Ad35 fiber is according to GenBank accession no. AP_000601 or an amino acid sequence corresponding thereto, e.g., where position 207 is Glu or Asp. In various embodiments, an Ad35 fiber has an amino acid sequence according to GenBank accession no. AP_000601. Further description of Ad35++ fiber knob mutations is found in Wang 2008 J. Virol. 82(21): 10567-10579, which is incorporated herein by reference in its entirety and with respect to fiber knobs. The present disclosure includes, for example, a recombinant Ad35 vector with a mutant Ad35 fiber knob or an Ad5/35 vector with a mutant Ad35 fiber knob.

[0141] In various embodiments, an adenoviral vector or genome of the present disclosure can be an adenoviral vector and/or genome disclosed in WO 2021/003432, which is herein incorporated by reference in its entirety, and particularly with respect to adenoviral vectors and genomes.

[0142] Various sequences corresponding to accession numbers disclosed herein, including e.g., accession numbers referred to herein as SEQ ID NOs: 199, 200, 201, 202, 203, 204, 205, 206, 207, 208, and/or 209 as indicated in Tables 1-22, are provided herein in the below listing of accession sequences. Those of skill in the art will appreciate that such sequences, including the sequences disclosed in the below listing of accession sequences, can be referenced in whole (e.g., by an accession number) or in part (e.g., by reference to a nucleotide position and/or a set or range of nucleotide positions of a sequence and/or accession number).

TABLE 1
Ad3 Genomic Sequences
Ad3 Genomic Sequences
Reference Ad3 Genome Sequence: GenBank
accession no. NC_011203 (SEQ ID NO: 199)

| | Exemplary Sequence | |
|---|---|---|
| Component | (position in reference) | SEQ ID NO: |
| Ad3 5′ (left) ITR | 1-136 | 1 |
| Ad3 3′ (right) ITR | 35208-35343 | 2 |
| Ad3 Packaging | 137-479 | 3 |
| Sequence | | |
| Ad3 E1 | 480-3918 | 4 |
| Ad3 E2 | 26643-3947 | 5 |
| Ad3 E3 | 27085-31186 | 6 |
| Ad3 fiber | 31368-32327 | 7 |
| Ad3 fiber tail | 31368-31493 | 8 |
| Ad3 fiber shaft | 31494-31763 | 9 |
| Ad3 fiber knob | 31764-32324 | 10 |
| Ad3 penton | 13905-15539 | 11 |
| Ad3 hexon | 18418-21252 | 12 |

TABLE 2
Ad3 Amino Acid Sequences
Ad3 Amino Acid Sequences

| | | SEQ |
|---|---|---|
| | Exemplary Sequence | ID |
| Component | (position in reference) | NO: |
| Ad3 fiber | 1-319 (GenBank accession no. YP_002213796) | 13 |
| Ad3 fiber shaft | 43-132 (GenBank accession no. YP_002213796) | 14 |
| Ad3 fiber knob | 134-319 (GenBank accession no. | 15 |
| | YP_002213796) | |
| Ad3 penton | 1-544 (GenBank accession no. YP_002213774) | 16 |
| Ad3 hexon | 1-944 (GenBank accession no. YP_002213779) | 17 |
| Ad3 fiber tail | 1-42 (GenBank accession no. YP_002213796) | 18 |

TABLE 3
Ad7 Genomic Sequences
Ad7 Genomic Sequences
Reference Ad7 Genome Sequence: GenBank
accession no. AC_000018 (SEQ ID NO: 200)

| | Exemplary Sequence | |
|---|---|---|
| Component | (position in reference) | SEQ ID NO: |
| Ad7 5′ (left) ITR | 1-136 | 19 |
| Ad7 3′ (right) ITR | 35379-35514 | 20 |
| Ad7 Packaging | 137-479 | 21 |
| Sequence | | |
| Ad7 E1 | 480-3919 | 22 |
| Ad7 E2 | 26867-3947 | 23 |
| Ad7 E3 | 27308-31345 | 24 |
| Ad7 fiber | 31529-32506 | 25 |
| Ad7 fiber tail | 31529-31654 | 26 |
| Ad7 fiber shaft | 31655-31927 | 27 |
| Ad7 fiber knob | 31928-32503 | 28 |
| Ad7 penton | 14153-15787 | 29 |
| Ad7 hexon | 18666-21470 | 30 |

TABLE 4
Ad7 Amino Acid Sequences
Ad7 Amino Acid Sequences

| | Exemplary Sequence | SEQ |
|---|---|---|
| Component | (position in reference) | ID NO: |
| Ad7 fiber | 1-325 (GenBank accession no. AP_000564) | 31 |
| Ad7 fiber shaft | 43-133 (GenBank accession no. AP_000564) | 32 |
| Ad7 fiber knob | 134-325 (GenBank accession no. AP_000564) | 33 |
| Ad7 penton | 1-544 (GenBank accession no. AP_000543) | 34 |
| Ad7 hexon | 1-934 (GenBank accession no. AP_000548) | 35 |
| Ad7 fiber tail | 1-42 (GenBank accession no. AP_000564) | 36 |

TABLE 5
Ad11 Genomic Sequences
Ad11 Genomic Sequences
Reference Ad11 Genome Sequence: GenBank
accession no. NC_011202 (SEQ ID NO: 201)

| | Exemplary Sequence | |
|---|---|---|
| Component | (position in reference) | SEQ ID NO: |
| Ad11 5′ (left) ITR | 1-137 | 37 |
| Ad11 3′ (right) ITR | 34658-34794 | 38 |
| Ad11 Packaging | 138-479 | 39 |
| Sequence | | |
| Ad11 E1 | 480-3931 | 40 |
| Ad11 E2 | 25445-3963 | 41 |
| Ad11 E3 | 26866-30624 | 42 |
| Ad11 fiber | 30811-31788 | 43 |
| Ad11 fiber tail | 30811-30936 | 44 |
| Ad11 fiber shaft | 30937-31209 | 45 |
| Ad11 fiber knob | 31210-31785 | 46 |
| Ad11 penton | 13682-15367 | 47 |
| Ad11 hexon | 18254-21100 | 48 |

TABLE 6
Ad11 Amino Acid Sequences
Ad11 Amino Acid Sequences

| | Exemplary Sequence | |
|---|---|---|
| Component | (position in reference) | SEQ ID NO: |
| Ad11 fiber | 1-325 (GenBank accession no. YP_002213828) | 49 |
| Ad11 fiber shaft | 43-133 (GenBank accession no. YP_002213828) | 50 |
| Ad11 fiber knob | 134-325 (GenBank accession no. YP_002213828) | 51 |
| Ad11 penton | 1-561 (GenBank accession no. YP_002213807) | 52 |
| Ad11 hexon | 1-948 (GenBank accession no. YP_002213812) | 53 |
| Ad11 fiber tail | 1-42 (GenBank accession no. YP_002213828) | 54 |

TABLE 7
Ad14 Genomic Sequences
Ad14 Genomic Sequences
Reference Ad14 Genome Sequence: GenBank
accession no. AY803294 (SEQ ID NO: 202)

| | Exemplary Sequence | |
|---|---|---|
| Component | (position in reference) | SEQ ID NO: |
| Ad14 5′ (left) ITR | 1-137 | 55 |
| Ad14 3′ (right) ITR | 34628-34764 | 56 |
| Ad14 Packaging | 138-479 | 57 |
| Sequence | | |
| Ad14 E1 | 480-3947 | 58 |
| Ad14 E2 | 23389-3963 | 59 |
| Ad14 E3 | 26854-30601 | 60 |
| Ad14 fiber | 30788-31765 | 61 |
| Ad14 fiber tail | 30788-30913 | 62 |
| Ad14 fiber shaft | 30914-31186 | 63 |
| Ad14 fiber knob | 31187-31762 | 64 |
| Ad14 penton | 13698-15374 | 65 |
| Ad14 hexon | 18252-21089 | 66 |

TABLE 8
Ad14 Amino Acid Sequences
Ad14 Amino Acid Sequences

| | | SEQ |
|---|---|---|
| | Exemplary Sequence | ID |
| Component | (position in reference) | NO: |
| Ad14 fiber | 1-325 (GenBank accession no. AAW33140) | 67 |
| Ad14 fiber shaft | 43-133 (GenBank accession no. AAW33140) | 68 |
| Ad14 fiber knob | 134-325 (GenBank accession no. | 69 |
| | AAW33140) | |
| Ad14 penton | 1-558 (GenBank accession no. AAW33119) | 70 |
| Ad14 hexon | 1-945 (GenBank accession no. AAW33124) | 71 |
| Ad14 fiber tail | 1-42 (GenBank accession no. AAW33140) | 72 |

TABLE 9
Ad16 Genomic Sequences
Ad16 Genomic Sequences
Reference Ad16 Genome Sequence: GenBank
accession no. AY601636 (SEQ ID NO: 203)

| | Exemplary Sequence | |
|---|---|---|
| Component | (position in reference) | SEQ ID NO: |
| Ad16 5′ (left) ITR | 1-114 | 73 |
| Ad16 3′ (right) ITR | 35409-35522 | 74 |
| Ad16 Packaging | 115-479 | 75 |
| Sequence | | |
| Ad16 E1 | 480-3910 | 76 |
| Ad16 E2 | 23580-3954 | 77 |
| Ad16 E3 | 27107-31263 | 78 |
| Ad16 fiber | 31448-32509 | 79 |
| Ad16 fiber tail | 31448-31573 | 80 |
| Ad16 fiber shaft | 31574-31933 | 81 |
| Ad16 fiber knob | 31934-32506 | 82 |
| Ad16 penton | 13902-17534 | 83 |
| Ad16 hexon | 18450-21272 | 84 |

TABLE 10
Ad16 Amino Acid Sequences
Ad16 Amino Acid Sequences

| | | SEQ |
|---|---|---|
| | Exemplary Sequence | ID |
| Component | (position in reference) | NO: |
| Ad16 fiber | 1-353 (GenBank accession no. AAW33461) | 85 |
| Ad16 fiber shaft | 43-172 (GenBank accession no. AAW33461) | 86 |
| Ad16 fiber knob | 173-353 (GenBank accession no. | 87 |
| | AAW33461) | |
| Ad16 penton | 1-555 (GenBank accession no. AAW33439) | 88 |
| Ad16 hexon | 1-940 (GenBank accession no. AAW33444) | 89 |
| Ad16 fiber tail | 1-42 (GenBank accession no. AAW33461) | 90 |

TABLE 11
Ad21 Genomic Sequences
Ad21 Genomic Sequences
Reference Ad21 Genome Sequence: GenBank
accession no. AY601633 (SEQ ID NO: 204)

| | Exemplary Sequence | |
|---|---|---|
| Component | (position in reference) | SEQ ID NO: |
| Ad21 5′ (left) ITR | 1-114 | 91 |
| Ad21 3′ (right) ITR | 35269-35382 | 92 |
| Ad21 Packaging | 115-479 | 93 |
| Sequence | | |
| Ad21 E1 | 480-3911 | 94 |
| Ad21 E2 | 23611-3924 | 95 |
| Ad21 E3 | 27441-31208 | 96 |
| Ad21 fiber | 31406-32377 | 97 |
| Ad21 fiber tail | 31406-31531 | 98 |
| Ad21 fiber shaft | 31532-31804 | 99 |
| Ad21 fiber knob | 31805-32374 | 100 |
| Ad21 penton | 13878-15563 | 101 |
| Ad21 hexon | 18454-21303 | 102 |

TABLE 12
Ad21 Amino Acid Sequences
Ad21 Amino Acid Sequences

| | Exemplary Sequence | SEQ |
|---|---|---|
| Component | (position in reference) | ID NO: |
| Ad21 fiber | 1-323 (GenBank accession no. AAW33370) | 103 |
| Ad21 fiber | 43-133 (GenBank accession no. AAW33370) | 104 |
| shaft | | |
| Ad21 fiber | 134-323 (GenBank accession no. AAW33370) | 105 |
| knob | | |
| Ad21 penton | 1-561 (GenBank accession no. AAW33349) | 106 |
| Ad21 hexon | 1-949 (GenBank accession no. AAW33354) | 107 |
| Ad21 fiber | 1-42 (GenBank accession no. AAW33370) | 108 |
| tail | | |

TABLE 13
Ad34 Genomic Sequences
Ad34 Genomic Sequences
Reference Ad34 Genome Sequence: GenBank
accession no. AY737797 (SEQ ID NO: 205)

| | Exemplary Sequence | |
|---|---|---|
| Component | (position in reference) | SEQ ID NO: |
| Ad34 5′ (left) ITR | 1-137 | 109 |
| Ad34 3′ (right) ITR | 34639-34775 | 110 |
| Ad34 Packaging | 138-479 | 111 |
| Sequence | | |
| Ad34 E1 | 480-3929 | 112 |
| Ad34 E2 | 23399-3945 | 113 |
| Ad34 E3 | 27185-30625 | 114 |
| Ad34 fiber | 30812-31783 | 115 |
| Ad34 fiber tail | 30812-30937 | 116 |
| Ad34 fiber shaft | 30938-31210 | 117 |
| Ad34 fiber knob | 31211-31780 | 118 |
| Ad34 penton | 13681-15357 | 119 |
| Ad34 hexon | 18244-21099 | 120 |

TABLE 14
Ad34 Amino Acid Sequences
Ad34 Amino Acid Sequences

| | Exemplary Sequence | SEQ |
|---|---|---|
| Component | (position in reference) | ID NO: |
| Ad34 fiber | 1-323 (GenBank accession no. AAW33501) | 121 |
| Ad34 fiber | 43-133 (GenBank accession no. AAW33501) | 122 |
| shaft | | |
| Ad34 fiber | 134-323 (GenBank accession no. AAW33501) | 123 |
| knob | | |
| Ad34 penton | 1-558 (GenBank accession no. ABC49791) | 124 |
| Ad34 hexon | 1-951 (GenBank accession no. AAW33485) | 125 |
| Ad34 fiber | 1-42 (GenBank accession no. AAW33501) | 126 |
| tail | | |

TABLE 15
Ad37 Genomic Sequences
Ad37 Genomic Sequences
Reference Ad37 Genome Sequence: GenBank
accession no. DQ900900 (SEQ ID NO: 206)

| | Exemplary Sequence | |
|---|---|---|
| Component | (position in reference) | SEQ ID NO: |
| Ad37 5′ (left) ITR | 1-159 | 127 |
| Ad37 3′ (right) ITR | 35055-35213 | 128 |
| Ad37 Packaging | 160-479 | 129 |
| Sequence | | |
| Ad37 E1 | 480-3867 | 130 |
| Ad37 E2 | 22777-3902 | 131 |
| Ad37 E3 | 26198-30771 | 132 |
| Ad37 fiber | 31038-32135 | 133 |
| Ad37 fiber tail | 31038-31163 | 134 |
| Ad37 fiber shaft | 31164-31592 | 135 |
| Ad37 fiber knob | 31593-32132 | 136 |
| Ad37 penton | 13530-15089 | 137 |
| Ad37 hexon | 17775-20624 | 138 |

TABLE 16
Ad37 Amino Acid Sequences
Ad37 Amino Acid Sequences

| | Exemplary Sequence | SEQ |
|---|---|---|
| Component | (position in reference) | ID NO: |
| Ad37 fiber | 1-361 (GenBank accession no. ABK59080) | 139 |
| Ad37 fiber | 43-185 (GenBank accession no. ABK59080) | 140 |
| shaft | | |
| Ad37 fiber | 186-361 (GenBank accession no. ABK59080) | 141 |
| knob | | |
| Ad37 penton | 1-519 (GenBank accession no. ABK59086) | 142 |
| Ad37 hexon | 1-949 (GenBank accession no. ABK59070) | 143 |
| Ad37 fiber | 1-42 (GenBank accession no. ABK59080) | 144 |
| tail | | |

TABLE 17
Ad50 Genomic Sequences
Ad50 Genomic Sequences
Reference Ad50 Genome Sequence: GenBank
accession no. AY737798 (SEQ ID NO: 207)

| | Exemplary Sequence | |
|---|---|---|
| Component | (position in reference) | SEQ ID NO: |
| Ad50 5′ (left) ITR | 1-114 | 145 |
| Ad50 3′ (right) ITR | 35272-35385 | 146 |
| Ad50 Packaging | 115-479 | 147 |
| Sequence | | |
| Ad50 E1 | 480-3910 | 148 |
| Ad50 E2 | 23590-3923 | 149 |
| Ad50 E3 | 27102-31222 | 150 |
| Ad50 fiber | 31409-32380 | 151 |
| Ad50 fiber tail | 31409-31534 | 152 |
| Ad50 fiber shaft | 31535-31807 | 153 |
| Ad50 fiber knob | 31808-32377 | 154 |
| Ad50 penton | 13888-15570 | 155 |
| Ad50 hexon | 18460-21282 | 156 |

TABLE 18
Ad50 Amino Acid Sequences
Ad50 Amino Acid Sequences

| | Exemplary Sequence | SEQ |
|---|---|---|
| Component | (position in reference) | ID NO: |
| Ad50 fiber | 1-323 (GenBank accession no. AAW33547) | 157 |
| Ad50 fiber | 43-133 (GenBank accession no. AAW33547) | 158 |
| shaft | | |
| Ad50 fiber | 134-323 (GenBank accession no. AAW33547) | 159 |
| knob | | |
| Ad50 penton | 1-560 (GenBank accession no. AAW33525) | 160 |
| Ad50 hexon | 1-940 (GenBank accession no. AAW33530) | 161 |
| Ad50 fiber | 1-42 (GenBank accession no. AAW33547) | 162 |
| tail | | |

TABLE 19
Ad5 Genomic Sequences
Ad5 Genomic Sequences
Reference Ad5 Genome Sequence: GenBank
accession no. AC_000008 (SEQ ID NO: 208)

| | Exemplary Sequence | |
|---|---|---|
| Component | (position in reference) | SEQ ID NO: |
| Ad5 5′ (left) ITR | 1-103 | 163 |
| Ad5 3′ (right) ITR | 35836-35938 | 164 |
| Ad5 Packaging | 104-479 | 165 |
| Sequence | | |
| Ad5 E1 | 480-3509 | 166 |
| Ad5 E2 | 4091-24032 | 167 |
| Ad5 E3 | 27174-30839 | 168 |
| Ad5 fiber | 31042-32787 | 169 |
| Ad5 fiber tail | 31042-31170 | 170 |
| Ad5 fiber shaft | 31171-32241 | 171 |
| Ad5 fiber knob | 32242-32784 | 172 |
| Ad5 penton | 14156-15871 | 173 |
| Ad5 hexon | 18842-21700 | 174 |

TABLE 20
Ad5 Amino Acid Sequences
Ad5 Amino Acid Sequences

| | Exemplary Sequence | SEQ |
|---|---|---|
| Component | (position in reference) | ID NO: |
| Ad5 fiber | 1-581 (GenBank accession no. AP_000226) | 175 |
| Ad5 fiber | 44-400 (GenBank accession no. AP_000226) | 176 |
| shaft | | |
| Ad5 fiber | 401-581 (GenBank accession no. AP_000226) | 177 |
| knob | | |
| Ad5 penton | 1-571 (GenBank accession no. AP_000206) | 178 |
| Ad5 hexon | 1-952 (GenBank accession no. AP_000211) | 179 |
| Ad5 fiber | 1-43 (GenBank accession no. AP_000226) | 180 |
| tail | | |

TABLE 21
Ad35 Genomic Sequences
Ad35 Genomic Sequences
Reference Ad5 Genome Sequence: GenBank
accession no. AY128640 (SEQ ID NO: 209)

| | Exemplary Sequence | |
|---|---|---|
| Component | (position in reference) | SEQ ID NO: |
| Ad35 5′ (left) ITR | 1-137 | 181 |
| Ad35 3′ (right) ITR | 34658-34794 | 182 |
| Ad35 Packaging | 138-479 | 183 |
| Sequence | | |
| Ad35 E1 | 480-3400 | 184 |
| Ad35 E2 | 3966-23415 | 185 |
| Ad35 E3 | 27198-30622 | 186 |
| Ad35 fiber | 30826-31797 | 187 |
| Ad35 fiber tail | 30826-30951 | 188 |
| Ad35 fiber shaft | 30952-31224 | 189 |
| Ad35 fiber knob | 31225-31797 | 190 |
| Ad35 penton | 13690-15375 | 191 |
| Ad35 hexon | 18255-21113 | 192 |

TABLE 22
Ad35 Amino Acid Sequences
Ad35 Amino Acid Sequences

| | Exemplary Sequence | SEQ |
|---|---|---|
| Component | (position in reference) | ID NO: |
| Ad35 fiber | 1-323 (GenBank accession no. AP_000601) | 193 |
| Ad35 fiber | 43-133 (GenBank accession no. AP_000601) | 194 |
| shaft | | |
| Ad35 fiber | 134-323 (GenBank accession no. AP_000601) | 195 |
| knob | | |
| Ad35 penton | 1-561 (GenBank accession no. AP_000580) | 196 |
| Ad35 hexon | 1-952 (GenBank accession no. AP_000585) | 197 |
| Ad35 fiber | 1-42 (GenBank accession no. AP_000601) | 198 |
| tail | | |

[0143] In various embodiments, an Ad3, 5, 7, 11, 14, 16, 21, 34, 35, 37, or 50 vector or genome includes modifications that reduce and/or eliminate replication of the virus in recipients. Broadly, there are three recognized “generations” of adenoviral vectors and genomes engineered to reduce and/or eliminate replication of the virus in recipients. Adenoviral vectors of the present disclosure can include vectors according to any of these three generations.

[0144] In various embodiments, an Ad3, 5, 7, 11, 14, 16, 21, 34, 35, 37, or 50 genome differs from a reference Ad sequence (e.g., one or more canonical, representative, exemplary, or wild-type sequence of an adenovirus of a serotype of interest) at least in that the regulatory E1 gene (E1a and E1b) is removed from the Ad genome (“first generation” vector modifications). First generation Ad vector including an E1 deletion are an example of an E1-deleted vector. E1a and E1b are the first transcriptional regulatory factors produced during the adenoviral replication cycle. E1 deletion reduces or eliminates expression of certain viral genes controlled by E1, and E1-deleted helper viruses are replication-defective. Thus, first generation Ad vectors are deficient for replication in a recipient. In some embodiments, first-generation adenoviral vectors are engineered to remove E1 and E3 genes. Retained portions of the reference genome can be identical in sequence to a reference genome or can have less than 100% identity with a reference genome, e.g., at least 99%, 98%, 97%, 96%, 95%, 90%, 85%, 80%, or 75% identity. Without these E1 (or E1 and E3) genes, adenoviral vectors cannot replicate on their own but can be produced in mammalian cell lines that express E1 (e.g., of the same serotype) or another protein sufficient to restore expression of the certain viral genes. For illustration, where an E1-deficient Ad5 vector encodes an Ad5 E4orf6, the helper vector can be propagated in a cell line that expresses Ad5 E1. In one exemplary cell type for adenoviral vector production, HEK293 cells express Ad5 E1b55k, which is known to form a complex with Ad5 E4 protein ORF6.

[0145] In various embodiments, an Ad3, 5, 7, 11, 14, 16, 21, 34, 35, 37, or 50 genome differs from a reference Ad sequence at least in that the E1 gene (E1a and E1b) and one or more of non-structural genes E2, E3 and/or E4 are deleted (“second generation” modifications). Second generation Ads have greater payload capacity than first generation Ads and are more deficient for replication than first generation viruses. In some embodiments, second-generation adenoviral vectors, in addition to E1/E3 removal, are engineered to remove non-structural genes E2 and E4, resulting in increased capacity and reduced immunogenicity. Retained portions of the reference genome can be identical in sequence to a reference genome or can have less than 100% identity with a reference genome, e.g., at least 99%, 98%, 97%, 96%, 95%, 90%, 85%, 80%, or 75% identity.

[0146] In various embodiments, an Ad3, 5, 7, 11, 14, 16, 21, 34, 35, 37, or 50 genome differs from a reference Ad sequence at least in that they are engineered to remove all viral coding sequences from the Ad genome, and retain only the ITRs of the genome and the packaging sequence of the genome or a functional fragment thereof (“third generation” modifications). Third generation adenoviral vectors can also be referred to as gutless, high capacity adenoviral vectors, or helper-dependent adenoviral vectors (HdAds). Retained portions of the reference genome can be identical in sequence to a reference genome or can have less than 100% identity with a reference genome, e.g., at least 99%, 98%, 97%, 96%, 95%, 90%, 85%, 80%, or 75% identity.

[0147] Because third generation Ad genomes do not encode the proteins necessary for viral production, they are helper-dependent: a helper-dependent genome can only be packaged into a vector if they are present in a cell that includes a nucleic acid sequence that provides viral proteins in trans. These helper-dependent vectors are also characterized by still greater capacity than first and second generation vectors and decreased immunogenicity. Because HDAd vectors do not express viral genes when used as a vector, the risk of cytotoxicity or interferon response in recipients is reduced.

[0148] Helper-dependent adenoviral vectors (HDAd) engineered to lack all viral coding sequences can efficiently transduce a wide variety of cell types, and can mediate long-term transgene expression with negligible chronic toxicity. By deleting the viral coding sequences and leaving only the cis-acting elements necessary for genome replication (ITRs) and packaging (W), cellular immune response against the Ad vector is reduced. HDAd vectors have a large cloning capacity of up to allowing for the delivery of large payloads. These payloads can include large therapeutic genes or even multiple transgenes and large regulatory components to enhance, prolong, and regulate transgene expression. It has also been observed that the certain HDAd vector genomes can be most efficiently packaged when the genome has at least a minimum a total length, e.g., a minimum to total length of at least 20 kb (e.g., 20, 21, 22, 23, 24, 25, 26, 27, 28, 29, 30, 31, 32, 33, 34, or 35 kb) which length can include, e.g., a therapeutic payload and/or a “stuffer” sequence. Where a payload does not utilize a number of nucleotides that causes the adenoviral genome to have at least a target length, a stuffer sequence can be used to achieve or surpass the target length. The present disclosure includes that a minimum length for efficient packaging is not required for beneficial use of vectors provided herein, such that meeting any target length may be advantageous but not required for use of compositions and methods provided herein. Like other adenoviral vectors, typical HDAd genomes generally remain episomal and do not integrate with a host genome.

[0149] Because HDAd vectors do not encode the viral proteins required to produce viral particles, viral proteins must be provided in trans, e.g., expressed in and/or by cells in which the HDAd genome is present. In some HDAd vector systems, one viral genome (a helper genome) encodes all of the proteins (e.g., all of the structural viral proteins) required for replication but has a conditional defect in the packaging sequence, making it less likely to be packaged into a vector under certain vector production conditions (e.g., in the presence of an agent that reduces function of the conditionally defective packaging sequence). Thus, the HDAd donor viral genome includes (e.g., only includes) Ad ITRs, a payload (e.g., a therapeutic payload), and a functional packaging sequence (e.g., a wild-type packaging sequence or a functional fragment thereof), which allows the HDAd donor viral genome to be selectively packaged into HDAd viral vectors produced from structural components expressed from the helper vector genome. In other words, Ad3, 5, 7, 11, 14, 16, 21, 34, 35, 37, or 50 helper vectors can be used for production of Ad3, 5, 7, 11, 14, 16, 21, 34, 35, 37, or 50 donor vectors. Production of HD Ad3, 5, 7, 11, 14, 16, 21, 34, 35, 37, or 50 vectors can include co-transfection of a plasmid containing the HDAd vector genome and a packaging-defective helper virus that provides structural and non-structural viral proteins. The helper virus genome can rescue propagation of the Ad3, 5, 7, 11, 14, 16, 21, 34, 35, 37, or 50 donor vector and Ad3, 5, 7, 11, 14, 16, 21, 34, 35, 37, or 50 donor vector can be produced, e.g., at a large scale, and isolated. Various protocols are known in the art, e.g., at Palmer et al., 2009 Gene Therapy Protocols. Methods in Molecular Biology, Volume 433. Humana Press; Totowa, NJ: 2009. pp. 33-53. In some embodiments, a helper genome is E1-deficient.

[0150] In some HDAd vector systems, a helper genome utilizes a recombinase system (e.g., a Cre/loxP system) for conditional packaging. In certain such HDAd vector systems, a helper genome can include a packaging sequence or functional fragment thereof (e.g., a fragment of the packaging sequence that is sufficient for packaging, required for packaging, or required for efficient packaging of the Ad genome into the capsid) flanked by recombinase (e.g., loxP) sites so that contact with a corresponding recombinase (e.g., Cre recombinase) excises the packaging sequence or functional fragment thereof from the helper genome by recombinase-mediated (e.g., Cre-mediated) site-specific recombination between the recombinase sites (e.g., loxP sites). The present disclosure includes, among other things, Ad3, 5, 7, 11, 14, 16, 21, 34, 35, 37, or 50 helper vectors and genomes that include two recombination sites that flank a packaging sequence or functional fragment thereof, where the two recombination sites are sites corresponding to (i.e., for, or acted upon by) the same recombinase.

[0151] In various embodiments, a helper genome can include deletion of E1, e.g., where the helper genome includes all of the viral genes except for E1, as E1 expression products can be supplied by complementary expression from the genome of a producer cell line. In some embodiments, to prevent generation of replication competent Ad (RCA) as a consequence of homologous recombination between the helper and HDAd donor genomes present in producer cells, a “stuffer” sequence can be inserted into the E3 region to render any recombinants too large to be packaged and/or efficiently packaged.

[0152] For production of HDAd vectors, an HDAd donor genome can be delivered to cells that express a recombinase for excision of the conditional packaging sequence of a helper vector (e.g., 293 cells (HEK293) that expresses Cre recombinase), optionally where the HDAd donor genome is delivered to the cells in a non-viral vector form, such as a bacterial plasmid form (e.g., where the HDAd donor genome is present in a bacterial plasmid (pHDAd) and/or is liberated by restriction enzyme digestion). The same cells can be transduced with the helper genome including a packaging sequence or functional fragment thereof flanked by recombinase sites (e.g., loxP sites). Thus, producer cells can be transfected with the HDAd donor genome and transduced with a helper genome bearing a packaging sequence or a functional fragment thereof flanked by recombinase sites (e.g., loxP sites), where the cells express a recombinase (e.g., Cre) corresponding to the recombinase sites such that excision of the packaging sequence or functional fragment thereof renders the helper virus genome deficient for packaging (e.g., unpackageable), but still able to provide all of the necessary trans-acting factors for production of HDAd donor vector including the HDAd donor genome.

[0153] Similar HDAd production systems have been developed using FLP (e.g., FLPe)/frt site-specific recombination, where FLP-mediated recombination between frt sites flanking the packaging sequence or functional fragment thereof of the helper genome reduces or eliminates packaging of helper genomes in producer cells that express FLP.

[0154] HDAd vectors including the donor vector genome including the payload can be isolated from the producer cells. HDAd donor vectors can be further purified from helper vectors by physical means. In general, some contamination of helper vectors and/or helper genomes in HDAd viral vectors and HDAd viral vector formulations can occur and can be tolerated.

[0155] HDAd3, 5, 7, 11, 14, 16, 21, 34, 35, 37, and 50 donor vectors, donor genomes, helper vectors, and helper genomes are also exemplary of compositions provided herein and can be used in various methods of the present disclosure. An HDAd3, 5, 7, 11, 14, 16, 21, 34, 35, 37, or 50 vector or genome is a helper-dependent Ad3, 5, 7, 11, 14, 16, 21, 34, 35, 37, or 50 vector or genome. An Ad3, 5, 7, 11, 14, 16, 21, 34, 35, 37, or 50 helper vector is a vector that includes a helper genome that includes a conditionally expressed (e.g., frt-site or loxP-site flanked) packaging sequence or fragment thereof and encodes all of the necessary trans-acting factors for production of Ad3, 5, 7, 11, 14, 16, 21, 34, 35, 37, or 50 virions into which the donor genome can be packaged.

[0156] The present disclosure further includes an HDAd3, 5, 7, 11, 14, 16, 21, 34, 35, 37, or 50 donor vector production system including a cell including an HDAd3, 5, 7, 11, 14, 16, 21, 34, 35, 37, or 50 donor genome and an Ad3, 5, 7, 11, 14, 16, 21, 34, 35, 37, or 50 helper genome. In certain such cells, viral proteins encoded and expressed by the helper genome can be utilized in production of HDAd3, 5, 7, 11, 14, 16, 21, 34, 35, 37, or 50 donor vectors in which the HDAd3, 5, 7, 11, 14, 16, 21, 34, 35, 37, or 50 donor genome is packaged. Accordingly, the present disclosure includes methods of production of HDAd3, 5, 7, 11, 14, 16, 21, 34, 35, 37, or 50 donor vectors by culturing cells that include an HDAd3, 5, 7, 11, 14, 16, 21, 34, 35, 37, or 50 donor genome and an Ad3, 5, 7, 11, 14, 16, 21, 34, 35, 37, or 50 helper genome. In some embodiments, the cells encode and express a recombinase that corresponds to recombinase direct repeats that flank a packaging sequence of the Ad3, 5, 7, 11, 14, 16, 21, 34, 35, 37, or 50 helper vector. In some embodiments, the flanked packaging sequence of the Ad3, 5, 7, 11, 14, 16, 21, 34, 35, 37, or 50 helper genome has been excised.

[0157] In some embodiments, the Ad3, 5, 7, 11, 14, 16, 21, 34, 35, 37, or 50 helper genome encodes all Ad3, 5, 7, 11, 14, 16, 21, 34, 35, 37, or 50 coding sequences. In some embodiments, the Ad3, 5, 7, 11, 14, 16, 21, 34, 35, 37, or 50 helper genome encodes and/or expresses all Ad3, 5, 7, 11, 14, 16, 21, 34, 35, 37, or 50 coding sequences except for one or more coding sequences of E1 and/or an E3 coding sequence and/or an E4 coding sequence. In various embodiments, a helper genome that does not encode and/or express an Ad3, 5, 7, 11, 14, 16, 21, 34, 35, 37, or 50 E1 gene does not encode and/or express an Ad3, 5, 7, 11, 14, 16, 21, 34, 35, 37, or 50 E4 gene. In various embodiments, as will be appreciate by those of skill in the art, cells of compositions and methods for production of HDAd donor vectors can be cells that express an E1 expression product.

[0158] The present disclosure includes, among other things, HDAd3, 5, 7, 11, 14, 16, 21, 34, 35, 37, or 50 donor vectors and genomes that include Ad3, 5, 7, 11, 14, 16, 21, 34, 35, 37, or 50 ITRs (a 5′ Ad3, 5, 7, 11, 14, 16, 21, 34, 35, 37, or 50 ITR and a 3′ ITR of the same serotype), e.g., where two Ad3, 5, 7, 11, 14, 16, 21, 34, 35, 37, or 50 ITRs flank a packaging sequence and a payload. The present disclosure includes, among other things, HDAd3, 5, 7, 11, 14, 16, 21, 34, 35, 37, or 50 donor vectors and genomes in which E1 or a fragment thereof is deleted. The present disclosure includes, among other things, HDAd3, 5, 7, 11, 14, 16, 21, 34, 35, 37, or 50 vectors and genomes in which E3 or a fragment thereof is deleted.

[0159] In various embodiments, excision of a packaging sequence or functional fragment thereof from an Ad3, 5, 7, 11, 14, 16, 21, 34, 35, 37, or 50 helper genome reduces propagation of the vector by, e.g., at least 20%, 30%, 40%, 50%, 60%, 70%, 80%, 90%, 91%, 92%, 93%, 94%, 95%, 96%, 97%, 98%, 99%, 99.5%, 99.9%, or 100% (e.g., reduces propagation of the vector by a percentage having a lower bound of 20%, 30%, 40%, 50%, 60%, 70%, and an upper bound of 60%, 70%, 80%, 90%, 91%, 92%, 93%, 94%, 95%, 96%, 97%, 98%, 99%, 99.5%, 99.9% or 100%), optionally where percent propagation is measured as the number of viral particles produced by propagation of excised vector (vector from which the recombinase site-flanked sequence has been excised) as compared to complete vector (vector from which the recombinase site-flanked sequence has not been excised) or as compared to wild-type Ad3, 5, 7, 11, 14, 16, 21, 34, 35, 37, or 50 vector under comparable conditions.

[0160] An additional optional engineering consideration can be engineering of a helper genome having a size that permits separation of helper vector from HDAd3, 5, 7, 11, 14, 16, 21, 34, 35, 37, or 50 donor vector by centrifugation, e.g., by CsCl ultracentrifugation. One means of achieving this result is to increase the size of the helper genome as compared to a typical Ad3, 5, 7, 11, 14, 16, 21, 34, 35, 37, or 50 genome. In particular, adenoviral genomes can be increased by engineering to at least 104% of wild-type length. Certain helper vectors of the present disclosure can accommodate a payload and/or stuffer sequence.

[0161] The present disclosure includes that in various embodiments a vector or genome of the present disclosure can include a selection of components each selected from, or having at least 75% sequence identity (e.g., at least 75%, 80%, 85%, 90%, 95%, 96%, 97%, 98%, 99%, or 100% identity) to, a corresponding sequence of a single particular serotype. To provide an illustrative example, all components can correspond to (e.g., have at least 75% sequence identity to sequences of) Ad34, excepting sequences otherwise indicated (e.g., a payload, e.g., a heterologous payload).

[0162] In various embodiments, a vector of the present disclosure is an HDAd5/35 vector that includes Ad5 capsid proteins except that the fibers are chimeric in that they include an Ad5 fiber tail, an Ad35 fiber shaft, and an Ad35 fiber knob (see, e.g., Shayakhmetov et al. 2000 J. Virol 74(6):2567-2583), optionally where the Ad35 fiber knob is mutated for increased affinity to CD46 (e.g., Ad5/35++). In particular embodiments, an Ad5/35++ vector is a chimeric Ad5/35 vector with a mutant Ad35++ fiber knob (see, e.g., Wang et al. 2008 J. Virol. 82(21):10567-79, which is incorporated herein by reference in its entirety and particularly with respect to fiber knob mutations). In various embodiments, an Ad35++ mutant fiber knob is an Ad35 fiber knob mutated to increase the affinity to CD46, e.g., by 25-fold, e.g., such that the Ad35++ mutant fiber knob increases cell transduction efficiency, e.g., at lower multiplicity of infection (MOI) (Li and Lieber, FEBS Letters, 593(24): 3623-3648, 2019). In certain embodiments, an adenoviral vector is a chimeric “F35” vector in which all proteins are Ad5 proteins except that the fibers are chimeric in that they include an Ad5 fiber tail, an Ad35 fiber shaft, and an Ad35 fiber knob (e.g., as described in Shayakhmetov et al. 2000 J. Virol 74(6):2567-2583), where the Ad35 fiber knob is a mutant Ad35 fiber knob including mutations D207G and T245A causing increased affinity to CD46 (see, e.g., Wang et al. 2008 J. Virol. 82(21):10567-79), and optionally where the genome encoding the Ad5/35 vector includes an E1 deletion.

[0163] In various embodiments, an adenoviral vector or genome of the present disclosure can be an adenoviral vector and/or genome disclosed in WO 2021/003432, which is herein incorporated by reference in its entirety, and particularly with respect to adenoviral vectors and genomes.

### I(C). Ad3, 5, 7, 11, 14, 16, 21, 34, 35, 37, and 50 Gene Therapy Vector Payloads

[0164] Ad3, 5, 7, 11, 14, 16, 21, 34, 35, 37, or 50 donor vectors and genomes of the present disclosure can include a variety of heterologous nucleic acid payloads that can include any of one or more coding sequences that encode one or more expression products, one or more regulatory sequences operably linked to a coding sequence, one or more stuffer sequences, and the like. In various embodiments, the payload is engineered in order to achieve a desired result such as a therapeutic effect in a host cell or system, e.g., expression of a protein of therapeutic interest or of expression of a gene editing system, e.g., a CRISPR/Cas system, base editing system, or prime editing system to generate a sequence modification of therapeutic interest, e.g., to correct a nucleic acid lesion.

[0165] In some embodiments, a payload can include a gene. A gene can include not only coding sequences but also regulatory regions such as promoters, enhancers, termination regions, locus control regions (LCRs), termination and polyadenylation signal elements, splicing signal elements, silencers, insulators, and the like. A gene can include introns and other DNA sequences spliced from an expressed mRNA transcript, along with variants resulting from alternative splice sites. Coding sequences can also include alternative synonymous codon usage as compared to a reference sequence, e.g., codon usage modified as compared to a reference in accordance with codon preference of a specific organism or target cell type.

[0166] A payload can include a single gene or multiple genes. A payload can include a single coding sequence or a plurality of coding sequences. A payload can include a single regulatory sequence or a plurality of regulatory sequences. A payload can include a plurality of coding sequences where the individual expression products of the coding sequences function together, e.g., as in the case of an endonuclease and a guide RNA, or independently, e.g., as two separate proteins that do not directly or indirectly bind. As will be appreciated by those of skill in the art, any payload or payload component (e.g., a payload-encoded expression product or regulatory sequence) that is not encoded by the reference wild-type Ad3, 5, 7, 11, 14, 16, 21, 34, 35, 37, or 50 genome can be referred to herein as a heterologous expression product.

[0167] For the avoidance of doubt, the present disclosure includes variants of amino acid and nucleic acid sequences provided herein. Variants include sequences with at least 70% sequence identity, 80% sequence identity, 85% sequence, 90% sequence identity, 95% sequence identity, 96% sequence identity, 97% sequence identity, 98% sequence identity, or 99% sequence identity to the protein and nucleic acid sequences described or disclosed herein where the variant exhibits substantially similar or improved biological function.

### I(C)(i). Payload Expression Products

[0168] A payload of an adenoviral donor vector or adenoviral donor genome of the present disclosure can include one or more coding sequences that encode any of a variety of expression products. Exemplary expression products include proteins, including without limitation replacement therapy proteins for treatment of diseases or conditions characterized by low expression or activity of a biologically active protein as compared to a reference level. Exemplary expression products include CRISPR/Cas, base editor, and prime editor systems. Exemplary expression products include antibodies, CARs, and TCRs. Exemplary expression products include small RNAs. In various embodiments, integration of all or a portion of a donor vector payload into a host cell genome is not required in order for delivery to the target cell of a donor vector or genome to produce an intended or target effect, e.g., in certain instances in which the intended or target effect includes editing of the host cell genome by a CRISPR, base editor, or prime editor system. In various embodiments, integration of all or a portion of a donor vector payload is required or preferred in order for delivery to the target cell of a donor vector or genome to produce an intended or target effect, e.g., where expression of a payload-encoded expression product is desired in progeny cells of a transduced target cell. In various embodiments, a payload can include a nucleic acid sequence engineered for integration into a host cell genome (an “integration element”), e.g., by recombination or transposition.

[0169] A gene sequence encoding one or more therapeutic proteins can be readily prepared by synthetic or recombinant methods from the relevant amino acid sequence. In particular embodiments, the gene sequence encoding any of these sequences can also have one or more restriction enzyme sites at the 5′ and/or 3′ ends of the coding sequence in order to provide for easy excision and replacement of the gene sequence encoding the sequence with another gene sequence encoding a different sequence. In particular embodiments, the gene sequence encoding the sequences can be codon optimized for expression in mammalian cells.

[0170] Particular examples of therapeutic genes and/or expression products include γ-globin, Factor VIII, γC, JAK3, IL7RA, RAG1, RAG2, DCLRE1C, PRKDC, LIG4, NHEJ1, CD3D, CD3E, CD3Z, CD3G, PTPRC, ZAP70, LCK, AK2, ADA, PNP, WHN, CHD7, ORAI1, STIM1, CORO1A, CIITA, RFXANK, RFX5, RFXAP, RMRP, DKC1, TERT, TINF2, DCLRE1B, SLC46A1, a FANC family gene (e.g., FancA, FancB, FancC, FancD1 (BRCA2), FancD2, FancE, FancF, FancG, FancI, FancJ (BRIP1), FancL, FancM, FancN (PALB2), FancO (RAD51C), FancP (SLX4), FancQ (ERCC4), FancR (RAD51), FancS (BRCA1), FancT (UBE2T), FancU (XRCC2), FancV (MAD2L2), and FancW (RFWD3)), soluble CD40, CTLA, Fas L, an antibody (e.g., that specifically binds CD4, CD5, CD7, CD52, IL1, IL2, IL6, TNF, P53, PTPN22, or DRB1*1501/DQB1*0602), an antibody to TCR specifically present on autoreactive T cells, IL4, IL10, IL12, IL13, IL1Ra, sIL1RI, sIL1RII, sTNFRI, sTNFRII, globin family genes, WAS, phox, dystrophin, pyruvate kinase, CLN3, ABCD1, arylsulfatase A, SFTPB, SFTPC, NLX2.1, ABCA3, GATA1, ribosomal protein genes, TERT, TERC, DKC1, TINF2, CFTR, LRRK2, PARK2, PARK7, PINK1, SNCA, PSEN1, PSEN2, APP, SOD1, TDP43, FUS, ubiquilin 2, C9ORF72, and other therapeutic genes and/or expression products described herein.

[0171] A therapeutic gene can be selected to provide a therapeutically effective response against diseases related to red blood cells and clotting. In particular embodiments, the disease is a hemoglobinopathy like thalassemia, or a sickle cell disease/trait. The therapeutic gene may be, for example, a gene that induces or increases production of hemoglobin; induces or increases production of β-globin, γ-globin, or α-globin; or increases the availability of oxygen to cells in the body. The therapeutic gene may be, for example, HBB or CYB5R3. Exemplary effective treatments may, for example, increase blood cell counts, improve blood cell function, or increase oxygenation of cells in patients. In another particular embodiment, the disease is hemophilia. The therapeutic gene may be, for example, a gene that increases the production of coagulation/clotting factor VIII or coagulation/clotting factor IX, causes the production of normal versions of coagulation factor VIII or coagulation factor IX, a gene that reduces the production of antibodies to coagulation/clotting factor VIII or coagulation/clotting factor IX, or a gene that causes the proper formation of blood clots. Exemplary therapeutic genes include F8 and F9. Exemplary effective treatments may, for example, increase or induce the production of coagulation/clotting factors VIII and IX; improve the functioning of coagulation/clotting factors VIII and IX, or reduce clotting time in subjects.

[0172] In various embodiments of the present disclosure, a donor vector encodes a globin gene, where the globin protein encoded by the globin gene is selected from a γ-globin, a β-globin, and/or an α-globin. Globin genes of the present disclosure can include, e.g., one or more regulatory sequences such as a promoter operably linked to a nucleic acid sequence encoding a globin protein. As those of skill in the art will appreciate, each of γ-globin, β-globin, and/or α-globin is a component of fetal and/or adult hemoglobin and is therefore useful in various vectors disclosed herein.

[0173] In various embodiments, increasing expression of a globin protein can refer to any of one or more of (i) increasing the amount, concentration, or expression (e.g., transcription or translation of nucleic acids encoding) in a cell or system of globin protein having a particular sequence; (ii) increasing the amount, concentration, or expression (e.g., transcription or translation of nucleic acids encoding) in a cell or system of globin protein of a particular type (e.g., the total amount of all proteins that would be identified as γ-globin (or alternatively β-globin or α-globin) by those of skill in the art or as set forth in the present specification) without respect to the sequences of the proteins relative to each other; and/or (iii) expressing in a cell or system a heterologous globin protein, e.g., a globin protein not encoded by a host cell prior to gene therapy.

[0174] The following references describe particular exemplary sequences of functional globin genes. References 1-4 relate to α-type globin sequences and references 4-12 relate to β-type globin sequences (including β and γ globin sequences), which sequences are hereby incorporated by reference: (1) GenBank Accession No. Z84721 (Mar. 19, 1997); (2) GenBank Accession No. NM_000517 (Oct. 31, 2000); (3) Hardison et al., J. Mol. Biol. (1991) 222(2):233-249; (4) A Syllabus of Human Hemoglobin Variants (1996), by Titus et al., published by The Sickle Cell Anemia Foundation in Augusta, Ga. (available online at globin.cse.psu.edu); (5) GenBank Accession No. J00179 (Aug. 26, 1993) or U01317.1; (6) Tagle et al., Genomics (1992) 13(3):741-760; (7) Grovsfeld et al., Cell (1987) 51(6):975-985; (8) Li et al., Blood (1999) 93(7):2208-2216; (9) Gorman et al., J. Biol. Chem. (2000) 275(46):35914-35919; (10) Slightom et al., Cell (1980) 21(3):627-638; (11) Fritsch et al., Cell (1980) 19(4): 959-972; (12) Marotta et al., J. Biol. Chem. (1977) 252(14):5040-5053. For additional coding and non-coding regions of genes encoding globins see, for example, by Marotta et al., Prog. Nucleic Acid Res. Mol. Biol. 19, 165-175, 1976, Lawn et al., Cell 21 (3), 647-651, 1980, and Sadelain et al., PNAS.; 92:6728-6732, 1995. In some embodiments, a globin gene encodes a G16D gamma globin variant.

[0175] An exemplary amino acid sequence of hemoglobin subunit β is provided, for example, at NCBI Accession No. P68871. An exemplary amino acid sequence for β-globin is provided, for example, at NCBI Accession No. NP_000509.

[0176] In addition to therapeutic genes and/or gene products, the transgene can also encode for therapeutic molecules, such as checkpoint inhibitor reagents, chimeric antigen receptor molecules specific to one or more cancer antigens, and/or T-cell receptors specific to one or more cancer antigens.

[0177] As another example, a therapeutic gene can be selected to provide a therapeutically effective response against a lysosomal storage disorder. In particular embodiments, the lysosomal storage disorder is mucopolysaccharidosis (MPS), type I; MPS II or Hunter Syndrome; MPS III or Sanfilippo syndrome; MPS IV or Morquio syndrome; MPS V; MPS VI or Maroteaux-Lamy syndrome; MPS VII or sly syndrome; α-mannosidosis; β-mannosidosis; glycogen storage disease type I, also known as GSDI, von Gierke disease, or Tay Sachs; Pompe disease; Gaucher disease; or Fabry disease. The therapeutic gene may be, for example a gene encoding or inducing production of an enzyme, or that otherwise causes the degradation of mucopolysaccharides in lysosomes. Exemplary therapeutic genes include IDUA or iduronidase, IDS, GNS, HGSNAT, SGSH, NAGLU, GUSB, GALNS, GLB1, ARSB, and HYAL1. Exemplary effective genetic therapies for lysosomal storage disorders may, for example, encode or induce the production of enzymes responsible for the degradation of various substances in lysosomes; reduce, eliminate, prevent, or delay the swelling in various organs, including the head (e.g., Macrocephaly), the liver, spleen, tongue, or vocal cords; reduce fluid in the brain; reduce heart valve abnormalities; prevent or dilate narrowing airways and prevent related upper respiratory conditions like infections and sleep apnea; reduce, eliminate, prevent, or delay the destruction of neurons, and/or the associated symptoms.

[0178] As another example, a therapeutic gene can be selected to provide a therapeutically effective response against a hyperproliferative disease. In particular embodiments, the hyperproliferative disease is cancer. The therapeutic gene may be, for example, a tumor suppressor gene, a gene that induces apoptosis, a gene encoding an enzyme, a gene encoding an antibody, or a gene encoding a hormone. Exemplary therapeutic genes and gene products include (in addition to those listed elsewhere herein) 101F6, 123F2 (RASSF1), 53BP2, ab1, ABLI, ADP, aFGF, APC, ApoAI, ApoAIV, ApoE, ATM, BAI-1, BDNF, Beta*(BLU), bFGF, BLC1, BLC6, BRCA1, BRCA2, CBFA1, CBL, C-CAM, CNTF, COX-1, CSFIR, CTS-1, cytosine deaminase, DBCCR-1, DCC, Dp, DPC-4, E1A, E2F, EBRB2, erb, ERBA, ERBB, ETS1, ETS2, ETV6, Fab, FCC, FGF, FGR, FHIT, fins, FOX, FUS1, FYN, G-CSF, GDAIF, Gene 21 (NPRL2), Gene 26 (CACNA2D2), GM-CSF, GMF, gsp, HCR, HIC-1, HRAS, hst, IGF, IL-1, IL-2, IL-3, IL-5, IL-6, IL-7, IL-8, IL-9, IL-11, ING1, interferon α, interferon β, interferon γ, IRF-1, JUN, KRAS, LUCA-1 (HYAL1), LUCA-2 (HYAL2), LYN, MADH4, MADR2, MCC, mda7, MDM2, MEN-I, MEN-II, MLL, MMAC1, MYB, MYC, MYCL1, MYCN, neu, NF-1, NF-2, NGF, NOEY1, NOEY2, NRAS, NT3, NT5, OVCA1, p16, p21, p27, p57, p73, p300, PGS, PIM1, PL6, PML, PTEN, raf, Rap1A, ras, Rb, RB1, RET, rks-3, ScFv, scFV ras, SEM A3, SRC, TALI, TCL3, TFPI, thrombospondin, thymidine kinase, TNF, TP53, trk, T-VEC, VEGF, VHL, WT1, WT-1, YES, and zac1. Exemplary effective genetic therapies may suppress or eliminate tumors, result in a decreased number of cancer cells, reduced tumor size, slow or eliminate tumor growth, or alleviate symptoms caused by tumors.

[0179] As another example, a therapeutic gene can be selected to provide a therapeutically effective response against an infectious disease. In particular embodiments, the infectious disease is human immunodeficiency virus (HIV). The therapeutic gene may be, for example, a gene rendering immune cells resistant to HIV infection, or which enables immune cells to effectively neutralize the virus via immune reconstruction, polymorphisms of genes encoding proteins expressed by immune cells, genes advantageous for fighting infection that are not expressed in the patient, genes encoding an infectious agent, receptor or coreceptor; a gene encoding ligands for receptors or coreceptors; viral and cellular genes essential for viral replication including; a gene encoding ribozymes, antisense RNA, small interfering RNA (siRNA) or decoy RNA to block the actions of certain transcription factors; a gene encoding dominant negative viral proteins, intracellular antibodies, intrakines and suicide genes. Exemplary therapeutic genes and gene products include α2β1; αvρ3; αvρ5; αvβ63; BOB/GPR15; Bonzo/STRL-33/TYMSTR; CCR2; CCR3; CCR5; CCR8; CD4; CD46; CD55; CXCR4; aminopeptidase-N; HHV-7; ICAM; ICAM-1; PRR2/HveB; HveA; α-dystroglycan; LDLR/α2MR/LRP; PVR; PRR1/HveC; and laminin receptor. A therapeutically effective amount for the treatment of HIV, for example, may increase the immunity of a subject against HIV, ameliorate a symptom associated with AIDS or HIV, or induce an innate or adaptive immune response in a subject against HIV. An immune response against HIV may include antibody production and result in the prevention of AIDS and/or ameliorate a symptom of AIDS or HIV infection of the subject, or decrease or eliminate HIV infectivity and/or virulence.

### I(C)(i)(a). Binding Domain, Antibody, CAR, and TCR Payload Expression Products

[0180] The present disclosure includes payloads that can include sequences that encode any of a variety of binding domains. Sequences that encode binding domains can encode, for example, antibodies, chimeric antigen receptors, TCRs, or other binding polypeptides.

[0181] Antibodies and antibody fragments are exemplary of binding domains. The term “antibody” can refer to a polypeptide that includes one or more canonical immunoglobulin sequence elements sufficient to confer specific binding to a particular antigen (e.g., a heavy chain variable domain, a light chain variable domain, and/or one or more CDRs). Thus, the term antibody includes, without limitation, human antibodies, non-human antibodies, synthetic and/or engineered antibodies, fragments thereof, and agents including the same. Antibodies can be naturally occurring immunoglobulins (e.g., generated by an organism reacting to an antigen). Synthetic, non-naturally occurring, or engineered antibodies can be produced by recombinant engineering, chemical synthesis, or other artificial systems or methodologies known to those of skill in the art.

[0182] As is well known in the art, typical human immunoglobulins are approximately 150 kD tetrameric agents that include two identical heavy (H) chain polypeptides (about 50 kD each) and two identical light (L) chain polypeptides (about 25 kD each) that associate with each other to form a structure commonly referred to as a “Y-shaped” structure. Typically, each heavy chain includes a heavy chain variable domain (VH) and a heavy chain constant domain (CH). The heavy chain constant domain includes three CH domains: CH1, CH2 and CH3. A short region, known as the “switch”, connects the heavy chain variable and constant regions. The “hinge” connects CH2 and CH3 domains to the rest of the immunoglobulin. Each light chain includes a light chain variable domain (VL) and a light chain constant domain (CL), separated from one another by another “switch.” Each variable domain contains three hypervariable loops known as “complement determining regions” (CDR1, CDR2, and CDR3) and four somewhat invariant “framework” regions (FR1, FR2, FR3, and FR4). In each VH and VL, the three CDRs and four FRs are arranged from amino-terminus to carboxy-terminus in the following order: FR1, CDR1, FR2, CDR2, FR3, CDR3, and FR4. The variable regions of a heavy and/or a light chain are typically understood to provide a binding moiety that can interact with an antigen. Constant domains can mediate binding of an antibody to various immune system cells (e.g., effector cells and/or cells that mediate cytotoxicity), receptors, and elements of the complement system. Heavy and light chains are linked to one another by a single disulfide bond, and two other disulfide bonds connect the heavy chain hinge regions to one another, so that the dimers are connected to one another and the tetramer is formed. When natural immunoglobulins fold, the FR regions form the beta sheets that provide the structural framework for the domains, and the CDR loop regions from both the heavy and light chains are brought together in three-dimensional space so that they create a single hypervariable antigen binding site located at the tip of the Y structure.

[0183] In some embodiments, an antibody is polyclonal, monoclonal, monospecific, or multispecific antibodies (including bispecific antibodies). In some embodiments, an antibody includes at least one light chain monomer or dimer, at least one heavy chain monomer or dimer, at least one heavy chain-light chain dimer, or a tetramer that includes two heavy chain monomers and two light chain monomers. Moreover, the term “antibody” can include (unless otherwise stated or clear from context) any art-known constructs or formats utilizing antibody structural and/or functional features including without limitation intrabodies, domain antibodies, antibody mimetics, Zybodies®, Fab fragments, Fab′ fragments, F(ab′)2 fragments, Fd′ fragments, Fd fragments, isolated CDRs or sets thereof, single chain antibodies, single-chain Fvs (scFvs), disulfide-linked Fvs (sdFv), polypeptide-Fc fusions, single domain antibodies (e.g., shark single domain antibodies such as IgNAR or fragments thereof), cameloid antibodies, camelized antibodies, masked antibodies (e.g., Probodies®), affybodies, anti-idiotypic (anti-Id) antibodies (including, e.g., anti-anti-Id antibodies), Small Modular ImmunoPharmaceuticals (“SMIPs™”), single chain or Tandem diabodies (TandAb®), VHHs, Anticalins®, Nanobodies® minibodies, BiTE®s, ankyrin repeat proteins or DARPINs®, Avimers®, DARTs, TCR-like antibodies, Adnectins®, Affilins®, Trans-bodies®, Affibodies®, TrimerX®, MicroProteins, Fynomers®, Centyrins®, and KALBITOR®s, CARs, engineered TCRs, and antigen-binding fragments of any of the above.

[0184] In various embodiments, an antibody includes one or more structural elements recognized by those skilled in the art as a complementarity determining region (CDR) or variable domain. In some embodiments, an antibody can be a covalently modified (“conjugated”) antibody (e.g., an antibody that includes a polypeptide including one or more canonical immunoglobulin sequence elements sufficient to confer specific binding to a particular antigen, where the polypeptide is covalently linked with one or more of a therapeutic agent, a detectable moiety, another polypeptide, a glycan, or a polyethylene glycol molecule). In some embodiments, antibody sequence elements are humanized, primatized, chimeric, etc, as is known in the art.

[0185] An antibody including a heavy chain constant domain can be, without limitation, an antibody of any known class, including but not limited to, IgA, secretory IgA, IgG, IgE and IgM, based on heavy chain constant domain amino acid sequence (e.g., alpha (α), delta (δ), epsilon (ε), gamma (γ) and mu (μ)). IgG subclasses are also well known to those in the art and include but are not limited to human IgG1, IgG2, IgG3 and IgG4. “Isotype” refers to the Ab class or subclass (e.g., IgM or IgG1) that is encoded by the heavy chain constant region genes. As used herein, a “light chain” can be of a distinct type, e.g., kappa (κ) or lambda (λ), based on the amino acid sequence of the light chain constant domain. In some embodiments, an antibody has constant region sequences that are characteristic of mouse, rabbit, primate, or human immunoglobulins. Naturally-produced immunoglobulins are glycosylated, typically on the CH2 domain. As is known in the art, affinity and/or other binding attributes of Fc regions for Fc receptors can be modulated through glycosylation or other modification. In some embodiments, an antibody may lack a covalent modification (e.g., attachment of a glycan) that it would have if produced naturally. In some embodiments, antibodies produced and/or utilized in accordance with the present invention include glycosylated Fc domains, including Fc domains with modified or engineered such glycosylation.

[0186] The term “antibody fragment” can refer to a portion of an antibody or antibody agent as described herein, and typically refers to a portion that includes an antigen-binding portion or variable region thereof. An antibody fragment can be produced by any means. For example, in some embodiments, an antibody fragment can be enzymatically or chemically produced by fragmentation of an intact antibody or antibody agent. Alternatively, in some embodiments, an antibody fragment can be recombinantly produced (i.e., by expression of an engineered nucleic acid sequence. In some embodiments, an antibody fragment can be wholly or partially synthetically produced. In some embodiments, an antibody fragment (particularly an antigen-binding antibody fragment) can have a length of at least about 50, 60, 70, 80, 90, 100, 110, 120, 130, 140, 150, 160, 170, 180, 190 amino acids or more, in some embodiments at least about 200 amino acids.

[0187] In some instances, it is beneficial for the binding domain to be derived from the same species it will ultimately be used in. For example, for use in humans, it may be beneficial for the antigen binding domain to include a human antibody, humanized antibody, or a fragment or engineered form thereof. Antibodies from human origin or humanized antibodies have lowered or no immunogenicity in humans and have a lower number of non-immunogenic epitopes compared to non-human antibodies. Antibodies and their engineered fragments will generally be selected to have a reduced level or no antigenicity in human subjects.

[0188] In various embodiments, a payload can encode a binding agent that is a checkpoint inhibitor such as an antibody that specifically binds an immune checkpoint protein. A number of immune checkpoint inhibitors are known. Immune checkpoint inhibitors can include peptides, antibodies, nucleic acid molecules and small molecules. Examples of immune checkpoints include PD-1, PD-L1, lymphocyte activation gene-3 (LAG-3), and T cell immunoglobulin and mucin domain-containing molecule 3 (TIM-3).

[0189] The present disclosure further includes antibodies and other binding domains that bind CD4, CD5, CD7, CD52, etc.; antibodies; antibodies to IL1, IL2, IL6; an antibody to TCR specifically present on autoreactive T cells; IL4; IL10; IL12; IL13; IL1Ra; sIL1RI; sIL1RII; antibodies to TNF; ABCA3; ABCD1; ADA; AK2; APP; arginase; arylsulfatase A; A1AT; CD3D; CD3E; CD3G; CD3Z; CFTR; CHD7; chimeric antigen receptor (CAR); CIITA; CLN3; complement factor, CORO1A; CTLA; C1 inhibitor; C9ORF72; DCLRE1B; DCLRE1C; decoy receptors; DKC1; DRB1*1501/DQB1*0602; dystrophin; enzymes; Factor VIII, FANC family genes (FancA, FancB, FancC, FancD1 (BRCA2), FancD2, FancE, FancF, FancG, FancI, FancJ (BRIP1), FancL, FancM, FancN (PALB2), FancO (RAD51C), FancP (SLX4), FancQ (ERCC4), FancR (RAD51), FancS (BRCA1), FancT (UBE2T), FancU (XRCC2), FancV (MAD2L2), and FancW (RFWD3)); Fas L; FUS; GATA1; globin family genes (i.e., γ-globin); F8; glutaminase; HBA1; HBA2; HBB; IL7RA; JAK3; LCK; LIG4; LRRK2; NHEJ1; NLX2.1; neutralizing antibodies; ORAI1; PARK2; PARK7; phox; PINK1; PNP; PRKDC; PSEN1; PSEN2; PTPN22; PTPRC; P53; pyruvate kinase; RAG1; RAG2; RFXANK; RFXAP; RFX5; RMRP; ribosomal protein genes; SFTPB; SFTPC; SOD1; soluble CD40; STIM1; sTNFRI; sTNFRII; SLC46A1; SNCA; TDP43; TERT; TERC; TINF2; ubiquilin 2; WAS; WHN; ZAP70; γC; and other therapeutic genes described herein.

[0190] Particular types of hematopoietic cells (e.g., T cells) can be engineered to encode and/or express chimeric antigen receptor (CAR) constructs. CARs can include several distinct subcomponents that can cause cells to recognize and kill target cells such as cancer cells. The subcomponents include at least an extracellular component and an intracellular component.

[0191] An extracellular CAR component can include a binding domain that specifically binds a marker that is preferentially present on the surface of unwanted cells. When the binding domain binds such markers, the intracellular component directs a cell to destroy the bound cancer cell. The binding domain is typically a single-chain variable fragment (scFv) derived from a monoclonal antibody (mAb), but it can be based on other formats which include an antibody-like antigen binding site.

[0192] Intracellular CAR components provide activation signals based on the inclusion of an effector domain. First generation CARs utilized the cytoplasmic region of CD3ζ as an effector domain. Second generation CARs utilized CD3ζ in combination with cluster of differentiation 28 (CD28) or 4-1BB (CD137), while third generation CARs have utilized CD3ζ in combination with CD28 and 401BB within intracellular effector domains.

[0193] Intracellular or otherwise cytoplasmic signaling components of a CAR are responsible for activation of the cell in which the CAR is expressed. The term “intracellular signaling components” or “intracellular components” is thus meant to include any portion of the intracellular domain sufficient to transduce an activation signal. Intracellular components of expressed CAR can include effector domains. An effector domain is an intracellular portion of a fusion protein or receptor that can directly or indirectly promote a biological or physiological response in a cell when receiving the appropriate signal. In certain embodiments, an effector domain is part of a protein or protein complex that receives a signal when bound, or it binds directly to a target molecule, which triggers a signal from the effector domain. An effector domain may directly promote a cellular response when it contains one or more signaling domains or motifs, such as an immunoreceptor tyrosine-based activation motif (ITAM). In other embodiments, an effector domain will indirectly promote a cellular response by associating with one or more other proteins that directly promote a cellular response, such as co-stimulatory domains.

[0194] Effector domains can provide for activation of at least one function of a modified cell upon binding to the cellular marker expressed by a cancer cell. Activation of the modified cell can include one or more of differentiation, proliferation and/or activation or other effector functions. In particular embodiments, an effector domain can include an intracellular signaling component including a T cell receptor and a co-stimulatory domain which can include the cytoplasmic sequence from a co-receptor or co-stimulatory molecule.

[0195] An effector domain can include one, two, three or more receptor signaling domains, intracellular signaling components (e.g., cytoplasmic signaling sequences), co-stimulatory domains, or combinations thereof. Exemplary effector domains include signaling and stimulatory domains selected from: 4-1BB (CD137), CARD11, CD3γ, CD3δ, CD3ε, CD3ζ, CD27, CD28, CD79A, CD79B, DAP10, FcRα, FcRβ (FcεR1b), FcRγ, Fyn, HVEM (LIGHTR), ICOS, LAG3, LAT, Lck, LRP, NKG2D, NOTCH1, pTα, PTCH2, OX40, ROR2, Ryk, SLAMF1, Slp76, TCRα, TCRβ, TRIM, Wnt, Zap70, or any combination thereof. In particular embodiments, exemplary effector domains include signaling and co-stimulatory domains selected from: CD86, FcγRIIa, DAP12, CD30, CD40, PD-1, lymphocyte function-associated antigen-1 (LFA-1), CD2, CD7, LIGHT, NKG2C, B7-H3, a ligand that specifically binds with CD83, CDS, ICAM-1, GITR, BAFFR, SLAMF7, NKp80 (KLRF1), CD127, CD160, CD19, CD4, CD8α, CD8β, IL2Rβ, IL2Rγ, IL7Rα, ITGA4, VLA1, CD49a, IA4, CD49D, ITGA6, VLA-6, CD49f, ITGAD, CD11d, ITGAE, CD103, ITGAL, CD11a, ITGAM, CD11b, ITGAX, CD11c, ITGB1, CD29, ITGB2, CD18, ITGB7, TNFR2, TRANCE/RANKL, DNAM1 (CD226), SLAMF4 (CD244, 2B4), CD84, CD96 (Tactile), CEACAM1, CRTAM, Ly9 (CD229), PSGL1, CD100 (SEMA4D), CD69, SLAMF6 (NTB-A, Ly108), SLAM (CD150, IPO-3), BLAME (SLAMF8), SELPLG (CD162), LTBR, GADS, PAG/Cbp, NKp44, NKp30, or NKp46.

[0196] Intracellular signaling component sequences that act in a stimulatory manner may include ITAMs. Examples of ITAMs including primary cytoplasmic signaling sequences include those derived from CD3γ, CD3δ, CD3ε, CD3ζ, CD5, CD22, CD66d, CD79a, CD79b, and common FcRγ (FCER1G), FcγR11a, FcRβ (Fcε Rib), DAP10, and DAP12. In particular embodiments, variants of CD3ζ retain at least one, two, three, or all ITAM regions.

[0197] In particular embodiments, an effector domain includes a cytoplasmic portion that associates with a cytoplasmic signaling protein, where the cytoplasmic signaling protein is a lymphocyte receptor or signaling domain thereof, a protein including a plurality of ITAMs, a co-stimulatory domain, or any combination thereof.

[0198] Additional examples of intracellular signaling components include the cytoplasmic sequences of the CD3ζ chain, and/or co-receptors that act in concert to initiate signal transduction following binding domain engagement.

[0199] A co-stimulatory domain is domain whose activation can be required for an efficient lymphocyte response to cellular marker binding. Some molecules are interchangeable as intracellular signaling components or co-stimulatory domains. Examples of costimulatory domains include CD27, CD28, 4-1BB (CD 137), OX40, CD30, CD40, PD-1, ICOS, lymphocyte function-associated antigen-1 (LFA-1), CD2, CD7, LIGHT, NKG2C, B7-H3, and a ligand that specifically binds with CD83. For example, CD27 co-stimulation has been demonstrated to enhance expansion, effector function, and survival of human CART cells in vitro and augments human T cell persistence and anti-cancer activity in vivo (Song et al. Blood. 2012; 119(3):696-706). Further examples of such co-stimulatory domain molecules include CDS, ICAM-1, GITR, BAFFR, HVEM (LIGHTR), SLAMF7, NKp80 (KLRF1), NKp44, NKp30, NKp46, CD160, CD19, CD4, CD8α, CD8β, IL2Rβ, IL2Rγ, IL7Rα, ITGA4, VLA1, CD49a, ITGA4, IA4, CD49D, ITGA6, VLA-6, CD49f, ITGAD, CD11d, ITGAE, CD103, ITGAL, CD11a, ITGAM, CD11b, ITGAX, CD111c, ITGB1, CD29, ITGB2, CD18, ITGB7, TNFR2, TRANCE/RANKL, DNAM1 (CD226), SLAMF4 (CD244, 2B4), CD84, CD96 (Tactile), NKG2D, CEACAM1, CRTAM, Ly9 (CD229), PSGL1, CD100 (SEMA4D), CD69, SLAMF6 (NTB-A, Ly108), SLAM (SLAMF1, CD150, IPO-3), BLAME (SLAMF8), SELPLG (CD162), LTBR, LAT, GADS, SLP-76, PAG/Cbp, and CD19a.

[0200] In particular embodiments, the amino acid sequence of the intracellular signaling component includes a variant of CD3ζ and a portion of the 4-1BB intracellular signaling component.

[0201] In particular embodiments, the intracellular signaling component includes (i) all or a portion of the signaling domain of CD3ζ, (ii) all or a portion of the signaling domain of 4-1BB, or (iii) all or a portion of the signaling domain of CD3ζ and 4-1BB.

[0202] Intracellular components may also include one or more of a protein of a Wnt signaling pathway (e.g., LRP, Ryk, or ROR2), NOTCH signaling pathway (e.g., NOTCH1, NOTCH2, NOTCH3, or NOTCH4), Hedgehog signaling pathway (e.g., PTCH or SMO), receptor tyrosine kinases (RTKs) (e.g., epidermal growth factor (EGF) receptor family, fibroblast growth factor (FGF) receptor family, hepatocyte growth factor (HGF) receptor family, insulin receptor (IR) family, platelet-derived growth factor (PDGF) receptor family, vascular endothelial growth factor (VEGF) receptor family, tropomycin receptor kinase (Trk) receptor family, ephrin (Eph) receptor family, AXL receptor family, leukocyte tyrosine kinase (LTK) receptor family, tyrosine kinase with immunoglobulin-like and EGF-like domains 1 (TIE) receptor family, receptor tyrosine kinase-like orphan (ROR) receptor family, discoidin domain (DDR) receptor family, rearranged during transfection (RET) receptor family, tyrosine-protein kinase-like (PTK7) receptor family, related to receptor tyrosine kinase (RYK) receptor family, or muscle specific kinase (MuSK) receptor family); G-protein-coupled receptors, GPCRs (Frizzled or Smoothened); serine/threonine kinase receptors (BMPR or TGFR); or cytokine receptors (IL1R, IL2R, IL7R, or IL15R).

[0203] CAR generally also include one or more linker sequences that are used for a variety of purposes within the molecule. For example, a transmembrane domain can be used to link the extracellular component of the CAR to the intracellular component. A flexible linker sequence often referred to as a spacer region that is membrane-proximal to the binding domain can be used to create additional distance between a binding domain and the cellular membrane. This can be beneficial to reduce steric hindrance to binding based on proximity to the membrane. A common spacer region used for this purpose is the IgG4 linker. More compact spacers or longer spacers can be used, depending on the targeted cell marker. Other potential CAR subcomponents are described in more detail elsewhere herein. Components of CAR are now described in additional detail as follows: (a) Binding Domains; (b) Intracellular Signalling Components; (c) Linkers; (d) Transmembrane Domains; (e) Junction Amino Acids; and (f) Control Features Including Tag Cassettes.

[0204] Transmembrane domains within a CAR molecule, often serve to connect the extracellular component and intracellular component through the cell membrane. The transmembrane domain can anchor the expressed molecule in the modified cell's membrane.

[0205] The transmembrane domain can be derived either from a natural and/or a synthetic source. When the source is natural, the transmembrane domain can be derived from any membrane-bound or transmembrane protein. Transmembrane domains can include at least the transmembrane region(s) of the α, β or ζ chain of a T-cell receptor, CD28, CD27, CD3 epsilon, CD45, CD4, CD5, CD8, CD9, CD16, CD22; CD33, CD37, CD64, CD80, CD86, CD134, CD137 and CD154. In particular embodiments, a transmembrane domain may include at least the transmembrane region(s) of, e.g., KIRDS2, OX40, CD2, CD27, LFA-1 (CD 11a, CD18), ICOS (CD278), 4-1BB (CD137), GITR, CD40, BAFFR, HVEM (LIGHTR), SLAMF7, NKp80 (KLRF1), NKp44, NKp30, NKp46, CD160, CD19, IL2Rβ, IL2Rγ, IL7R a, ITGA1, VLA1, CD49a, ITGA4, IA4, CD49D, ITGA6, VLA-6, CD49f, ITGAD, CD11d, ITGAE, CD103, ITGAL, CD11a, ITGAM, CD11b, ITGAX, CD11c, ITGB1, CD29, ITGB2, CD18, ITGB7, TNFR2, DNAM1(CD226), SLAMF4 (CD244, 2B4), CD84, CD96 (Tactile), CEACAM1, CRT AM, Ly9(CD229), PSGL1, CD100 (SEMA4D), SLAMF6 (NTB-A, Ly108), SLAM (SLAMF1, CD150, IPO-3), BLAME (SLAMF8), SELPLG (CD162), LTBR, PAG/Cbp, NKG2D, or NKG2C. In particular embodiments, a variety of human hinges can be employed as well including the human Ig (immunoglobulin) hinge (e.g., an IgG4 hinge, an IgD hinge), a GS linker (e.g., a GS linker described herein), a KIR2DS2 hinge or a CD8a hinge.

[0206] TCRs refer to naturally occurring T cell receptors. Payloads of the present disclosure can encode a TCR or a CAR/TCR hybrids that includes an element of a TCR and an element of a CAR. For example, a CAR/TCR hybrid could have a naturally occurring TCR binding domain with an effector domain that the TCR binding domain is not naturally associated with. A CAR/TCR hybrid could have a mutated TCR binding domain and an ITAM signaling domain. A CAR/TCR hybrid could have a naturally occurring TCR with an inserted non-naturally occurring spacer region or transmembrane domain.

### I(C)(i)(b). Gene Editing Systems and Components

[0207] In various embodiments, a payload of the present disclosure encodes at least one component, or all components, of a gene editing system. Gene editing systems of the present disclosure include CRISPR systems, base editing, and prime editing systems. Broadly, gene editing systems can include a plurality of components including a gene editing enzyme selected from a CRISPR-associated RNA-guided endonuclease, a base editing enzyme, and a prime editing enzyme and at least one gRNA. Accordingly, gene editing systems of the present disclosure can include either (i) in the case of a CRISPR system, a CRISPR enzyme that is a CRISPR-associated RNA-guided endonuclease and at least one guide RNA (gRNA), (ii) in the case of a base editing system, a base editing enzyme and at least one gRNA, or (iii) in the case of a prime editing system and at least one prime editing gRNA. Nucleotide sequences encoding gene editing systems as disclosed herein are typically too large for inclusion in many limited-capacity vector systems, but the large capacity of adenoviral vectors permits inclusion of such sequences in adenoviral vectors and genomes of the present disclosure. An additional advantage of adenoviral vectors and genomes with payloads encoding gene editing systems or components of the present disclosure is that adenoviral genomes do not naturally integrate into host cell genomes, which facilitates transient expression of gene editing systems and components, which can be desirable, e.g., to avoid immunogenicity and/or genotoxicity.

[0208] In other embodiments, a gene editing system can include engineered zing finger nucleases (ZFN). For instance, a ZFN is an artificial endonuclease that consists of a designed zinc finger protein (ZFP) fused to the cleavage domain of the FokI restriction enzyme. A ZFN may be redesigned to cleave new targets by developing ZFPs with new sequence specificities. For genome engineering, a ZFN is targeted to cleave a chosen genomic sequence. The cleavage event induced by the ZFN provokes cellular repair processes that in turn mediate efficient modification of the targeted locus. If the ZFN-induced cleavage event is resolved via non-homologous end joining, this can result in small deletions or insertions, effectively leading to gene knockout. If the break is resolved via a homology-based process in the presence of an investigator-provided donor, small changes or entire transgenes can be transferred, often without selection, into the chromosome; which can be referred to as ‘gene correction’ and ‘gene addition,’ respectively.

[0209] In some embodiments, a gene editing system (e.g., a CRISPR system, base editing system, or prime editing system) is engineered to modify a nucleic acid sequence that encodes γ-globin, e.g., to increase expression of γ-globin. The main fetal form of hemoglobin, hemoglobin F (HbF) is formed by pairing of γ-globin polypeptide subunits with α-globin polypeptide subunits. Human fetal γ-globin genes (HBG1 and HBG2; two highly homologous genes produced by evolutionary duplication) are ordinarily silenced around birth, while expression of adult β-globin gene expression (HBB and HBD) increases. Mutations that cause or permit persistent expression of fetal γ-globin throughout life can ameliorate phenotypes of β-globin deficiencies. Thus, reactivation of fetal γ-globin genes can be therapeutically beneficial, particularly in subjects with β-globin deficiency. A variety of mutations that cause increased expression of γ-globin are known in the art (see, e.g., Wienert, Trends in Genetics 34(12): 927-940, 2018, which is incorporated herein by reference in its entirety and with respect to mutations that increase expression of γ-globin). Certain such mutations are found in the HBG1 promoter or HBG2 promoter.

[0210] In various embodiments, a gene editing system designed to increase expression of γ-globin includes an HBG1/2 promoter-targeted gRNA that is designed to increase expression of γ-globin coding by modification and/or inactivation of a BCL11A repressor protein binding site. In various embodiments, a gene editing system designed to increase expression of γ-globin includes a bcl11a-targeted gRNA that is designed to increase expression of γ-globin by modification and/or inactivation of the erythroid bcl11a enhancer to reduce BCL11A repressor protein expression in erythroid cells. In various embodiments, a gene editing system designed to increase expression of γ-globin includes a gRNA targeted to cause a loss of function mutation in the gene encoding BCL11A.

### I(C)(i)(b)(1). CRISPR Payload Expression Products

[0211] The present disclosure includes, among other things, CRISPR editing agents and systems, and nucleic acids encoding the same, e.g., where the nucleic acid is present in an adenoviral vector or genome. A CRISPR editing system can include a CRISPR editing enzyme and/or at least one gRNA as components thereof. The CRISPR (Clustered Regularly Interspaced Short Palindromic Repeats)/Cas (CRISPR-associated protein) nuclease system is an engineered nuclease system used for genetic engineering that is based on a bacterial system. It is based in part on the adaptive immune response of many bacteria and archaea. When a virus or plasmid invades a bacterium, segments of the invader's DNA are converted into CRISPR RNAs (crRNA) by the bacteria's “immune” response. The crRNA then associates, through a region of partial complementarity, with another type of RNA called tracrRNA to guide a Cas nuclease to a region homologous to the crRNA in the target DNA called a “protospacer.” The Cas nuclease cleaves the DNA to generate blunt ends at the double-strand break at sites specified by a 20-nucleotide complementary strand sequence contained within the crRNA transcript. In some instances, the Cas nuclease requires both the crRNA and the tracrRNA for site-specific DNA recognition and cleavage.

[0212] Guide RNAs (gRNAs) are an example of an element that can target CRISPR editing. In its simplest form, gRNA provides a sequence that targets a site within a genome based on complementarity (e.g., crRNA). As explained below, however, gRNA can also include additional components. For example, in particular embodiments, gRNA can include a targeting sequence (e.g., crRNA) and a component to link the targeting sequence to a cutting element. This linking component can be tracrRNA. In particular embodiments, gRNA including crRNA and tracrRNA can be expressed as a single molecule referred to as single gRNA (sgRNA). gRNA can also be linked to a cutting element through other mechanisms such as through a nanoparticle or through expression or construction of a dual or multi-purpose molecule. Those of skill in the art will appreciate that gRNA or other targeting elements that can be used to generate a selected nucleic acid sequence correction or modification, e.g., in a host cell of an adenoviral donor vector or genome of the present disclosure, can be readily designed and implemented, e.g., based on available sequence information.

[0213] In particular embodiments, targeting elements (e.g., gRNA) can include one or more modifications (e.g., a base modification, a backbone modification), to provide the nucleic acid with a new or enhanced feature (e.g., improved stability). Modified backbones may include those that retain a phosphorus atom in the backbone and those that do not have a phosphorus atom in the backbone. Suitable modified backbones containing a phosphorus atom may include, for example, phosphorothioates, chiral phosphorothioates, phosphorodithioates, phosphotriesters, aminoalkylphosphotriesters, methyl and other alkyl phosphonates such as 3′-alkylene phosphonates, 5′-alkylene phosphonates, chiral phosphonates, phosphinates, phosphoramidates including 3′-amino phosphoramidate and aminoalkylphosphoramidates, phosphorodiamidates, thionophosphoramidates, thionoalkylphosphonates, thionoalkylphosphotriesters, selenophosphates, and boranophosphates having normal 3′-5′ linkages, 2′-5′ linked analogs, and those having inverted polarity where one or more internucleotide linkages is a 3′ to 3′, a 5′ to 5′ or a 2′ to 2′ linkage. Suitable targeting elements having inverted polarity can include a single 3′ to 3′ linkage at the 3′-most internucleotide linkage (i.e. a single inverted nucleoside residue in which the nucleobase is missing or has a hydroxyl group in place thereof). Various salts (e.g., potassium chloride or sodium chloride), mixed salts, and free acid forms can also be included.

[0214] Examples of cutting elements include nucleases. CRISPR-Cas loci have more than 50 gene families and there are no strictly universal genes, indicating fast evolution and extreme diversity of loci architecture. Exemplary Cas nucleases include Cas1, Cas1B, Cas2, Cas3, Cas4, Cas5, Cas6, Cas7, Cas8, Cas9 (also known as Csn1 or Csx12; including, e.g., spCas9, dCas9, nCas9, and Cas9-SpRY), Cas10, Cas12 (e.g., Cas12a (e.g., LbCas12a, AsCas12a, FnCas12a, MB3Cas12a, Cas12a-M11, Cas12a-M13 (e.g., Cas12a-M13-1), Cas12a-M26 (e.g., Cas12a-M26-1), Cas12a-M28 (e.g., Cas12a-M28-1), Cas12a-M29 (e.g., Cas12a-M29-1), Cas12a-M30 (e.g., Cas12a-M30-1), Cas12a-M31 (e.g., Cas12a-M31-1), Cas12a-M32 (e.g., Cas12a-M32-1), Cas12a-M57, Cas12a-M58, Cas12a-M59, Cas12a-M60 (e.g., Cas12a-M60-9), Cas12a-M61, or Cas12a-M62), Cas12b, Cas12c, Cas12g, Cas12h, or Cas12i), Cas-Phi, CasX, CasY, Cpf1, C2c3, C2c2, C2c1, Csy1, Csy2, Csy3, Cse1, Cse2, Csc1, Csc2, Csa5, Csn2, Csm2, Csm3, Csm4, Csm5, Csm6, Cmr1, Cmr3, Cmr4, Cmr5, Cmr6, Cpf1, Csb1, Csb2, Csb3, Csx17, Csx14, Csx10O, Csx16, CsaX, Csx3, Csx1, Csx15, Csf1, Csf2, Csf3, Csf4, and variants thereof.

[0215] There are three main types of Cas nucleases (type I, type II, and type III), and 10 subtypes including 5 type I, 3 type II, and 2 type III proteins (see, e.g., Hochstrasser and Doudna, Trends Biochem Sci, 2015:40(1):58-66). Type II Cas nucleases include Cas1, Cas2, Csn2, and Cas9. These Cas nucleases are known to those skilled in the art. For example, the amino acid sequence of the Streptococcus pyogenes wild-type Cas9 polypeptide is set forth, e.g., in NCBI accession no. NP_269215, and the amino acid sequence of Streptococcus thermophilus wild-type Cas9 polypeptide is set forth, e.g., in NCBI accession no. WP_011681470.

[0216] In particular embodiments, Cas9 refers to an RNA-guided double-stranded DNA-binding nuclease protein or nickase protein. Wild-type Cas9 nuclease has two functional domains, e.g., RuvC and HNH, that cut different DNA strands. Cas9 can induce double-strand breaks in genomic DNA (target DNA) when both functional domains are active. The Cas9 enzyme, in some embodiments, includes one or more catalytic domains of a Cas9 protein derived from bacteria such as Corynebacter, Sutterella, Legionella, Treponema, Filif actor, Eubacterium, Streptococcus, Lactobacillus, Mycoplasma, Bacteroides, Flaviivola, Flavobacterium, Sphaerochaeta, Azospirillum, Gluconacetobacter, Neisseria, Roseburia, Parvibaculum, Staphylococcus, Nitratifractor, and Campylobacter. In some embodiments, the Cas9 is a fusion protein, e.g. the two catalytic domains are derived from different bacterial species.

[0217] In some embodiments, crRNA and tracrRNA can be combined into one molecule called a single gRNA (sgRNA). In this engineered approach, the sgRNA guides Cas to target any desired sequence (see, e.g., Jinek et al., Science 337:816-821, 2012; Jinek et al., eLife 2:e00471, 2013; Segal, eLife 2:e00563, 2013). Thus, the CRISPR/Cas system can be engineered to create a double-strand break at a desired target in a genome of a cell, and harness the cell's endogenous mechanisms to repair the induced break by HDR, or NHEJ. Particular embodiments described herein utilize homology arms to promote HDR at defined integration sites.

[0218] In various embodiments, variants of the Cas9 nuclease include a single inactive catalytic domain, such as a RuvC″ or HNH″ enzyme or a nickase. A Cas9 nickase has only one active functional domain and, in some embodiments, cuts only one strand of the target DNA, thereby creating a single strand break or nick. In some embodiments, the mutant Cas9 nuclease having at least a D10A mutation is a Cas9 nickase. In other embodiments, the mutant Cas9 nuclease having at least a H840A mutation is a Cas9 nickase. Other examples of mutations present in a Cas9 nickase include N854A and N863 A. A double-strand break is introduced using a Cas9 nickase if at least two DNA-targeting RNAs that target opposite DNA strands are used. A double-nicked induced double-strand break is repaired by HDR or NHEJ. This gene editing strategy generally favors HDR and decreases the frequency of indel mutations at off-target DNA sites. The Cas9 nuclease or nickase, in some embodiments, is codon-optimized for the target cell or target organism.

### I(C)(i)(b)(2). Base Editor Payload Expression Products

[0219] The present disclosure includes, among other things, base editing agents and and systems, and nucleic acids encoding the same, e.g., where the nucleic acid is present in an adenoviral vector or genome. A base editing system can include a base editing enzyme and/or at least one gRNA as components thereof. A base editing system can utilize a deaminase (e.g., a base editing system) for editing of nucleic acid targets. In certain particular embodiments, a base editing agent and/or a base editing system of the present disclosure is present in an Ad3, 5, 7, 11, 14, 16, 21, 34, 35, 37, or 50 adenoviral vector

[0220] Deamination is the removal of an amine group from a molecule such as a nucleotide of a nucleic acid. Deamination of a nucleotide can cause changes in the sequence of a nucleic acid, and deaminases are useful in editing for at least that reason. Deamination of adenosine (A) yields inosine (I), which has the same base pairing preferences as a guanosine in DNA and is thus recognized by cell replication machinery as guanosine, resulting in an A-T to G-C transition. Deamination of cytosine (C) yields uridine (U), which is recognized by cell replication machinery as thymine, resulting in a C-G to T-A transition. Collectively, cytosine and adenosine deamination can be used to cause transitions from A to G, T to C, C to T, or G to A. Other deaminase activities are also known. For example, deamination of 5-methylcytosine yields thymine and deamination of guanosine yields xanthine, though xanthine, like guanosine, pairs with cytosine. Deaminases that deaminate cytosine can be referred to as cytosine deaminases. Deaminases that deaminate adenosine can be referred to as adenosine deaminases.

[0221] In particular embodiments, a base editing enzyme includes a cytidine deaminase domain or an adenine deaminase domain. Certain embodiments utilize a cytidine deaminase domain as the nucleobase deaminase enzyme. Particular embodiments utilize an adenine deaminase domain as the nucleobase deaminase enzyme.

[0222] Examples of cytosine deaminase enzymes (CBEs) include APOBEC1, APOBEC3A, APOBEC3G, CDA1, and AID. APOBEC1 particularly accepts single-stranded (ss)DNA as a substrate but is incapable of acting on double-stranded (ds)DNA.

[0223] For adenosine base editors (ABEs), exemplary adenosine deaminases that can act on DNA for adenine base editing include a mutant TadA adenosine deaminases (TadA*) that accepts DNA as its substrate. E. coli TadA typically acts as a homodimer to deaminate adenosine in transfer RNA (tRNA). TadA* deaminase catalyzes the conversion of a target ‘A’ to ‘I’ (inosine), which is treated as ‘G’ by cellular polymerases. Subsequently, an original genomic A-T base pair can be converted to a G-C pair. As the cellular inosine excision repair is not as active as uracil excision, ABE does not require any additional inhibitor protein like UGI in CBE. In some embodiments, an ABE can include one or more, or all, of three components including a wild-type E. coli tRNA-specific adenosine deaminase (TadA) monomer, which can play a structural role during base editing, a TadA* mutant TadA monomer that catalyzes deoxyadenosine deamination, and/or a Cas nickase such as Cas9(D10A). In certain embodiments, there is a linker positioned between TadA and TadA*, and in certain embodiments there is a linker positioned between TadA* and the Cas nickase. In various embodiments, one or both linkers includes at least 6 amino acids, e.g., at least 5, 6, 7, 8, 9, 10, 15, 20, 25, 30, 35, 40, 45, or 50 amino acids (e.g., having a lower bound of 5, 6, 7, 8, 9, 10, or 15, amino acids and an upper bound of 20, 25, 30, 35, 40, 45, or 50 amino acids). In various embodiments, one or both linkers include 32 amino acids. In some embodiments, one or both linkers has a sequence according to (SGGS)₂-XTEN-(SGGS)₂ (SEQ ID NO: 213) or a sequence otherwise known to those of skill in the art.

[0224] In various embodiments, an editing system includes a deaminase associated with a DNA binding domain such as a catalytically impaired nuclease domain. In various embodiments, the DNA binding domain can localize the deaminase to a target nucleic acid in which one or more nucleotides are deaminated by the deaminase. Catalytically impaired nuclease domains are polypeptide domains that have amino acid sequences engineered from reference nuclease domain sequences but that have a reduced ability to cause double-strand breaks (DSBs) as compared to the reference (e.g., a wild type and/or fully functional nuclease) or have no ability to cause double-strand breaks. As referred to herein, a nickase refers to a catalytically impaired nuclease domain that, upon contact with a double-stranded nucleic acid substrate, cleaves one strand (e.g., a target strand) of the double-stranded nucleic acid but not both strands of the double-stranded nucleic acid. In various embodiments, a nickase, upon contact with a double-stranded nucleic acid substrate, cleaves one strand of the double-stranded nucleic acid but not both strands of the double-stranded nucleic acid in at least 70% of contacted double-stranded nucleic acid substrates (e.g., at least 70%, 75%, 80%, 85%, 90%, 91%, 92%, 93%, 94%, 95%, 96%, 97%, 98%, 99%, or 100% of double-stranded nucleic acid substrates).

[0225] Base editing systems are exemplary of editing systems that include deaminase enzymes. A base editing enzyme includes a deaminase enzyme fused to a DNA binding domain that is a catalytically impaired nuclease domain (e.g., a nickase, e.g., a nickase that nicks a single strand, e.g., a non-edited strand). DNA binding domains of base editing enzymes can be RNA guided DNA binding domains, in that an RNA guide can direct the DNA binding domain to a target nucleic acid sequence. Catalytically impaired nuclease domains of a base editing enzyme can bind nucleic acids and can localize the deaminase enzyme to a target nucleic acid.

[0226] Any nuclease of the CRISPR system can be engineered to produce a catalytically impaired nuclease domain (e.g., a nickase) and used within a base editing enzyme or system. Exemplary Cas nucleases include Cas1, Cas1B, Cas2, Cas3, Cas4, Cas5, Cas6, Cas7, Cas8, Cas9 (also known as Csn1 or Csx12; including, e.g., spCas9, dCas9, nCas9, and Cas9-SpRY), Cas10, Cas12 (e.g., Cas12a (e.g., LbCas12a, AsCas12a, FnCas12a, MB3Cas12a, Cas12a-M11, Cas12a-M13 (e.g., Cas12a-M13-1), Cas12a-M26 (e.g., Cas12a-M26-1), Cas12a-M28 (e.g., Cas12a-M28-1), Cas12a-M29 (e.g., Cas12a-M29-1), Cas12a-M30 (e.g., Cas12a-M30-1), Cas12a-M31 (e.g., Cas12a-M31-1), Cas12a-M32 (e.g., Cas12a-M32-1), Cas12a-M57, Cas12a-M58, Cas12a-M59, Cas12a-M60 (e.g., Cas12a-M60-9), Cas12a-M61, or Cas12a-M62), Cas12b, Cas12c, Cas12g, Cas12h, or Cas12i), Cas-Phi, CasX, C2c3, C2c2, C2c1, Csy1, Csy2, Csy3, Cse1, Cse2, Csc1, Csc2, Csa5, Csn2, Csm2, Csm3, Csm4, Csm5, Csm6, Cmr1, Cmr3, Cmr4, Cmr5, Cmr6, Cpf1, Csb1, Csb2, Csb3, Csx17, Csx14, Csx10, Csx16, CsaX, Csx3, Csx1, Csx15, Csf1, Csf2, Csf3, Csf4, and variants thereof. Numerous forms and variants of Cas nucleases are known in the art (e.g., spCas9, dCas9, nCas9, Cas9-SpRY, and Cas12a) and can have distinct characteristics, including for example recognition of distinct PAMs and PAM positions.

[0227] In various embodiments, a catalytically impaired nuclease domain generates a single-stranded nick in the non-deaminated DNA strand, inducing cells to repair the non-deaminated strand using the deaminated strand as a template. To provide one example, nCas9 can create a nick in target DNA by cutting a single strand, reducing the likelihood of detrimental indel formation as compared to methods that require a double-strand break.

[0228] Particular embodiments utilize a nuclease-inactive Cas9 (dCas9) as the catalytically disabled nuclease. However, any nuclease of the CRISPR system (many of which are described above) can be disabled and used within a base editing system. In particular embodiments, a Cas9 domain with high fidelity is selected where the Cas9 domain displays decreased electrostatic interactions between the Cas9 domain and a sugar-phosphate backbone of a DNA, as compared to a wild-type Cas9 domain. In some embodiments, a Cas9 domain (e.g., a wild type Cas9 domain) includes one or more mutations that decrease the association between the Cas9 domain and a sugar-phosphate backbone of a DNA. Cas9 domains with high fidelity are known to those skilled in the art. For example, Cas9 domains with high fidelity have been described in Kleinstiver (2016 Nature 529: 490-495) and Slaymaker (2015 Science 351: 84-88).

[0229] Other DNA binding nucleases can also be used in a base editing enzyme. For example, base-editing systems can utilize zinc finger nucleases (ZFNs) (see, e.g., Urnov 2010 Nat Rev Genet. 11(9): 636-46) and transcription activator like effector nucleases (TALENs) (see, e.g., Joung 2013 Nat Rev Mol Cell Biol. 14(1): 49-55). For additional information regarding DNA-binding nucleases, see, e.g., US 2018/0312825.

[0230] In various embodiments, a base editing enzyme includes a DNA glycosylase inhibitor. A DNA glycosylase inhibitor can override natural DNA repair mechanisms that might otherwise repair the intended base editing. A DNA glycosylase inhibitor can be a uracil DNA glycosylase inhibitor protein (UGI). One exemplary UGI is described in Wang (1991 Gene 99:31-37). In particular embodiments, a base editing enzyme can include one or more DNA glycosylase inhibitor domains (e.g., UGI domains). In various embodiments, base editing enzymes that include more than one DNA glycosylase inhibitor domain (e.g., UGI domain) can generate fewer indels and/or deaminate target nucleic acids more efficiently than base editing enzymes that includes one DNA glycosylase inhibitor domain (e.g., UGI domain) and/or no DNA glycosylase inhibitor domains (e.g., UGI domains). For example, in particular embodiments, dCas9 or a Cas9 nickase can be fused to a cytidine deaminase domain and the dCas9 or Cas9 nickase can be fused to one or more UGI domains.

In particular embodiments, a deaminase domain is associated with the N-terminus of a catalytically disabled nuclease. In particular embodiments, a deaminase domain is associated with the N-terminus of a catalytically disabled nuclease. In certain embodiments, one or more glycosylase inhibitors (e.g., UGI domain) can be associated with the C-terminus of a catalytically disabled nuclease.

[0231] Components of base editors can be fused directly (e.g., by direct covalent bond) or via linkers. For example, the catalytically disabled nuclease can be fused via a linker to the deaminase enzyme and/or a glycosylase inhibitor. Multiple glycosylase inhibitors can also be fused via linkers. As will be understood by one of ordinary skill in the art, linkers can be used to link any peptides or portions thereof.

[0232] Exemplary linkers include polymeric linkers (e.g., polyethylene, polyethylene glycol, polyamide, polyester); amino acid linkers; carbon-nitrogen bond amide linkers; cyclic or acyclic, substituted or unsubstituted, branched or unbranched aliphatic or heteroaliphatic linkers; monomeric, dimeric, or polymeric aminoalkanoic acid linkers; aminoalkanoic acid (e.g., glycine, ethanoic acid, alanine, β-alanine, 3-aminopropanoic acid, 4-aminobutanoic acid, 5-pentanoic acid) linkers; monomeric, dimeric, or polymeric aminohexanoic acid (Ahx) linkers; carbocyclic moiety (e.g., cyclopentane, cyclohexane) linkers; aryl or heteroaryl moiety linkers; and phenyl ring linkers.

[0233] Linkers can also include functionalized moieties to facilitate attachment of a nucleophile (e.g., thiol, amino) from a peptide to the linker. Any electrophile may be used as part of the linker. Exemplary electrophiles include activated esters, activated amides, Michael acceptors, alkyl halides, aryl halides, acyl halides, and isothiocyanates.

[0234] In particular embodiments, linkers range from 4-100 amino acids in length. In particular embodiments, linkers are 4 amino acids, 9 amino acids, 14 amino acids, 16 amino acids, 32 amino acids, or 100 amino acids.

[0235] Various base editing enzymes are known in the art. Examples of base editing enzymes include BE1 (APOBEC1-16 amino acid (aa) linker-Sp dCas9 (D10A, H840A) (see, e.g., Komor 2016 Nature 533: 420-424)), BE2 (APOBEC1-16aa linker-Sp dCas9 (D10A, H840A)-4aa linker-UGI (see, e.g., Komor 2016 Nature 533: 420-424)), BE3 (APOBEC1-16aa linker-SpnCas9 (D10A)-4aa linker-UGI (see, e.g., Komor 2016 Nature 533: 420-424)), HF-BE2 (rAPOBEC1-HF2 nCas9-UGI), HF-BE3 (APOBEC1-16aa linker-HF nCas9 (D10A)-4aa linker-UGI (see, e.g., Rees 2017 Nat. Commun. 8: 15790)), BE4 (rAPOBEC1-Sp nCas9-UGI-UGI), BE4max (APOBEC1-32aa linker-Sp nCas9 (D10A)-9aa linker-UGI-9aa linker-UGI (see, e.g., Koblan 2018 Nat. Biotechnol 36(9): 843-846 and/or Komor 2017 Sci. Adv. 3(8): eaao4774)), BE4-GAM (Gam-16aa linker-APOBEC1-32aa linker-Sp nCas9 (D10A)-9aa linker-UGI-9aa linker-UGI (see, e.g., Komor 2017 Sci. Adv. 3(8): eaao4774)), YE1-BE3 (APOBEC1 (W90Y, R126E)-16aa linker-Sp nCas9 (D10A)-4aa linker-UGI (see, e.g., Kim 2017 Nat. Biotechnol. 35: 475-480)), EE-BE3 (APOBEC1 (R126E, R132E)-16aa linker-Sp nCas9 (D10A)-4aa linker-UGI (see, e.g., Kim 2017 Nat. Biotechnol. 35: 475-480)), YE2-BE3 (APOBEC1 (W90Y, R132E)-16aa linker-Sp nCas9 (D10A)-4aa linker-UGI (see, e.g., Kim 2017 Nat. Biotechnol. 35: 475-480)), YEE-BE3 (APOBEC1 (W90Y, R126E, R132E)-16aa linker-Sp nCas9 (D10A)-4aa linker-UGI (see, e.g., Kim 2017 Nat. Biotechnol. 35: 475-480)), VQR-BE3 (APOBEC1-16aa linker-Sp VQR nCas9 (D10A)-4aa linker-UGI (see, e.g., Kim 2017 Nat. Biotechnol. 35: 475-480)), EQR-BE3 (rAPOBEC1-EQR SpnCas9-UGI), VRER-BE3 (APOBEC1-16aa linker-Sp VRER nCas9 (D10A)-4aa linker-UGI (see, e.g., Kim 2017 Nat. Biotechnol. 35: 475-480)), Sa-BE3 (APOBEC1-16aa linker-Sa nCas9 (D10A)-4aa linker-UGI (see, e.g., Kim 2017 Nat. Biotechnol. 35: 475-480)), SA-BE4 (APOBEC1-32aa linker-Sa nCas9 (D10A)-9aa linker-UGI-9aa linker-UGI (see, e.g., Komor 2017 Sci. Adv. 3(8): eaao4774)), SaBE4-Gam (Gam-16aa linker-APOBEC1-32aa linker-Sa nCas9 (D10A)-9aa linker-UGI-9aa linker-UGI (see, e.g., Komor 2017 Sci. Adv. 3(8): eaao4774)), SaKKH-BE3 (APOBEC1-16aa linker-Sa KKH nCas9 (D10A)-4aa linker-UGI (see, e.g., Kim 2017 Nat. Biotechnol. 35: 475-480)), FNLS-BE3 (rAPOBEC1-Sp nCas9-UGI), RA-BE3 (rAPOBEC1 (RA)-Sp nCas9-UGI), Cas12a-BE (APOBEC1-16aa linker-dCas12a-14aa linker-UGI (see, e.g., Li 2018 Nat. Biotechnol. 36: 324-327)), Target-AID (Sp nCas9 (D10A)-100aa linker-CDA1-9aa linker-UGI (see, e.g., Nishida 2016 Science 353(6305): aaf8729)), Target-AID-NG (Sp nCas9 (D10A)-NG-100aa linker-CDA1-9aa linker-UGI (see, e.g., Nishimasu 2018 Science 361(6408): 1259-1262)), xBE3 (APOBEC1-16aa linker-xCas9(D10A)-4aa linker-UGI (see, e.g., Hu 2018 Nature 556: 57-63)), eA3A-BE3 (APOBEC3A (N37G)-16aa linker-Sp nCas9(D10A)-4aa linker-UGI (see, e.g., Gehrke 2018 Nat. Biotechnol. 36(10): 977-982)), A3A-BE3 (hAPOBEC3A-16aa linker-Sp nCas9(D10A)-4aa linker-UGI (see, e.g., Wang 2018 Nat. Biotechnol. 36: 946-949)), eA3A-HF1-BE3-2xUGI (APOBEC3A-HF1 Sp nCas9-UGI-UGI), eA3A-HypaBE3-2xUGI (APOBEC3A-Hypa Sp nCas9-UGI-UGI), hA3A-BE3 (hAPOBEC3A-Sp nCas9-UGI), hA3B-BE3 (hAPOBEC3B-Sp nCas9-UGI), hA3G-BE3 (hAPOBEC3G-Sp nCas9-UGI), hAID-BE3 (hAPOBEC3A-Sp nCas9-UGI), SaCas9-BE3 (rAPOBEC1-SanCas9-UGI), xCas9-BE3 (rAPOBEC1-xnCas9-UGI), ScCas9-BE3 (rAPOBEC1-ScnCas9-UGI), SniperCas9-BE3 (rAPOBEC1-SnipernCas9-UGI), iSpyMac-BE3 (rAPOBEC1-iSpyMacnCas9-UGI), CRISPR-X (Sp dCas9-MS2-hAID), TAM (Sp dCas9-hAID (P182X)), AncBE4-Max (rAPOBEC1-Sp nCas9-UGI-UGI), ABE7.8/9/10 (ecTadA-ecTadA*-Sp nCas9), xCas9-ABE7.10 (ecTadA-ecTadA*-nxCas9), VQR-ABE (ecTadA-ecTadA*-Sp VQR nCas9), Sa(KKH)-ABE ecTadA-ecTadA*-Sa KKH nCas9), ABEmax (ecTadA-ecTadA*-Sp nCas9), ABE7.10max (ecTadA-ecTadA*-SpnCas9), ABE8e)ecTadA-ecTadA*-SpnCas9), PE1 (dSpCas9-MMLV-RT), PE2 (dSpCas9-MMLV-RT), PE3 (nSpCas9-MMLV-RT), and BE-PLUS (10× GCN4-Sp nCas9(D10A)/ScFv-rAPOBEC1-UGI (see, e.g., Jiang 2018 Cell Res. 28(8): 855-861)). For additional examples of BE complexes, including adenine deaminase base editors, see, e.g., Rees 2018 Nat. Rev Genet. 19(12): 770-788 and/or Kantor 2020 Int. J. Mol. Sci. 21(17): 6240.

[0236] Various base editors are “dual base editors” that can edit both adenine and cytosine. Dual base editor enzymes can be fusion polypeptides that include a cytosine deaminase domain and an adenine deaminase domain. For instance, a dual base editor known as Target-ACEmax includes a codon-optimized fusion of the cytosine deaminase PmCDA1, the adenosine deaminase TadA, and a Cas9 nickase (Target-ACEmax) (see, e.g., Sakata 2020 Nature Biotechnology, 38(7), 865-869). Other exemplary dual base editors include SPACE (synchronous programmable adenine and cytosine editor). The SPACE editing enzyme is a fusion polypeptide that includes both miniABEmax-V82G and Target-AID editing domains together with a Cas9 (SpCas9-D10A) nickase domain (see, e.g., Grünewald 2020 Nat. Biotechnol. 38:861-864). A dual base editor known as A&C-BEmax includes a fusion of both cytidine and adenosine deaminase domains with a Cas9 nickase domain (see, e.g., Zhang 2020 Nat. Biotechnol. 38:856-860).

[0237] A base editing system can include a guide RNA (gRNA) that includes at least a fragment that base pairs with a complementary target nucleic acid (e.g., at least 80% identity between the fragment and the complement of the target nucleic acid, e.g., 80%, 85%, 90%, 91%, 92%, 93%, 94%, 95%, 96%, 97%, 98%, 99%, or 100% identity), where the fragment can be 10 to 40 nucleotides in length (e.g., equal to or about 10, 15, 16, 17, 18, 19, 20, 21, 22, 23, 24, 25, 30, 35 or 40 nucleotides in length, e.g., 17-24 or 17-20 nucleotides in length), e.g., where the target sequence is upstream of an appropriate PAM site. In various embodiments, a fragment of a gRNA that is complementary to a target nucleic acid sequence is positioned at the 5′ end of a gRNA or is 5′ relative to one or more other fragments of the gRNA. In various embodiments, a gRNA includes a sequence that forms a stemloop structure and binds with and/or recruits the catalytically impaired nuclease domain of a base editing enzyme. A gRNA that includes both a fragment that base pairs with a complementary target nucleic acid sequence and a fragment that forms a stemloop structure and binds with and/or recruits the catalytically impaired nuclease domain of a base editing enzyme can be referred to as a single guide RNA (sgRNA). The fragments of sgRNA can be associated via a linker fragment.

[0238] A guide RNA (e.g., an sgRNA) is thought to randomly interrogate nucleic acids until it encounters a nucleic acid that is sufficiently complementary to the 5′ fragment. Upon binding of a gRNA to a DNA nucleic acid target present in double-stranded DNA, base pairing between the gRNA and target nucleic acid strand causes displacement of a small segment of single-stranded DNA. In various embodiments, the gRNA recruits the catalytically impaired nuclease domain. Nucleotides of the displaced single-stranded DNA can be modified by the deaminase enzyme. The resultant base pair can then be repaired by cellular mismatch repair machinery to a new base pair, or alternatively in some instances reverted by base excision repair mediated by uracil glycosylase. In various embodiments, a glycosylase inhibitor (e.g., UGI) reduces the occurrence of reversion.

[0239] The present disclosure includes base editing enzymes and systems engineered to increase the editing window of base editing. For example, the present disclosure includes circularly permuted base editors, described for example in Huang 2020 Nature Biotechnology, 37(6), 626-631, which is incorporated herein with respect to base editing enzymes, base editing systems, and editing windows thereof. Circularly permuted base editing enzymes and systems can be characterized by an increased range of target bases that can be modified within the protospacer up to and including, for example, at least 5, 6, 7, 8, or 9 nucleotides. For example, certain base editing systems including Cas9 variants, including cytosine and four adenine base editing enzymes, can deaminated nucleotides in a window expanded from about 4-5 nucleotides to up about 8-9 nucleotides, optionally with reduced byproduct formation.

[0240] Base editing enzymes and systems can also target and/or modify RNA molecules. One advantage of using RNA editing systems is that there is no permanent change in the genome. RNA base editors achieve analogous changes using components that base modify RNA. For example, adenosine deaminase can modify transcribed mRNA, replacing adenosine with inosine at a target site. In mammals, the most prevalent post-transcription RNA editing case is catalyzed by the adenosine deaminase enzymes (ADARs). ADAR proteins are a highly conserved family of proteins that include a single deaminase domain (DD) and one or more double-stranded RNA (dsRNA)-binding domains ADARs (e.g., ADAR 1 or ADAR2) bind to dsRNA and catalyzes adenosine to inosine (A-to-I), which is read as guanosine by cellular translational machinery. ADAR1 and ADAR2 domains have been demonstrated to achieve RNA editing, e.g., in HSCs (see, e.g., Harter 2009 Nat. Immunol. 10(1): 109-115). A number of catalytically inactive Cas proteins have also been used to target RNA molecules, including Cas9, Cas13a, Cas13b, and Cas13d.

[0241] REPAIR (RNA editing for programmable adenosine to inosine replacement) is an RNA base editing system that includes catalytically inactive Cas13 protein and the deaminase activity of ADAR2. Cas13 generally includes two HEPN (higher eukaryotes and prokaryotes nucleotide-binding) domains, which contribute to RNA-targeted nucleolytic activity. Mutations of HEPNs abolish RNA cleavage activity while maintaining RNA targeting activity, which has been used to create an RNA base editing enzyme (e.g., REPAIR) (see, e.g., Cox 2017 Science 358:1019-1027). dCas13-ADAR2_{DD} includes catalytically inactive dCas13 variant with RNA deaminase ADAR2 (E488Q), and can execute RNA editing for programmable A-to-I (G) replacement. RNA Editing for Specific C-to-U Exchange (RESCUE) was later developed (see, e.g., Abudayyeh 2019 Science 365:382-386). gRNAs for mRNA editing can include, e.g., a fragment complementary to a target RNA and an ADAR-recruiting fragment, such that site-directed RNA editing is achieved by recruiting ADAR to a complementary target nucleic acid. RNA-guided RNA-targeting CRISPR nuclease C2C2 (later named as Cas13a) from Leptotrichia shahii was illustrated (Abudayyeh 2016 Science 353: aaf5573).

[0242] Other examples of RNA editing systems that include ADARs can include removing the endogenous RNA-targeting domains (dsRBMS) from human adenosine deaminase and replacing them with an antisense RNA oligonucleotide to produce a recombinant enzyme that can be directed to edit a selected RNA target. In particular embodiments, an ADAR2 deaminase domain is fused with an RNA-binding protein, and the sequence bound by the RNA-binding protein is associated with an antisense RNA guide oligonucleotide. In various embodiments, the RNA-binding protein is derived from λ-phage N protein-boxB RNA interaction, which normally regulates antitermination during transcription of λ-phage mRNAs. λN peptide mediates binding of the N protein, is only 22 amino acids long, and the boxB RNA hairpin that it recognizes is only 17 nucleotides long and they can bind with nanomolar affinity. Thus, in various embodiments, λN peptide can be fused to the deaminase domain of human ADAR2 (λN-DD). In various embodiments, a mutant ADAR2_{DD}(E488Q) can be used as the deaminase domain. In various embodiments, an editing enzyme can include an ADAR deaminase domain and 2 or more λN domains (e.g., 2, 3, 4, 5, or 6 λN domains). Examples of such editing enzymes and systems are described, e.g., in Montiel-Gonzalez 2013 PNAS 110(45): 18285-18290 and Montiel-Gonzalez 2016 Nuc. Acids. Res. 44(2): e157, each of which is incorporated herein by reference with respect to editing systems.

[0243] Other examples of editing systems that include ADARs can include leveraging endogenous ADAR for programmable editing of RNA (LEAPER) editing system that employs short engineered ADAR-recruiting RNAs (arRNAs) to recruit native ADAR1 or ADAR2 deaminase enzymes to change a specific adenosine to inosine. For example, in certain particular embodiments, an ADAR protein or its catalytic domain can be fused with a λN peptide. In certain embodiments, an ADAR protein or its catalytic domain can be fused with a λN peptide and a SNAP-tag or a Cas protein (e.g., dCas13b). A gRNA can recruit the editing enzyme to the specific site. Further description of LEAPER editing systems can be found in Qu 2019 Nat. Biotech. 1059-1069, which is incorporated herein by reference with respect to LEAPER editing systems and

[0244] Base editing systems can cause point mutations without producing double-strand breaks. Base editing systems can cause point mutations without producing undesired insertions and deletions (indels). For example, a base editing system can cause indels in less than 10%, 9%, 8%, 7%, 6%, 5.5%, 5%, 4.5%, 4%, 3.5%, 3%, 2.5%, 2%, 1.5%, 1%, 0.5%, or 0.1% of edited cells or editing events.

[0245] Those of skill in the art will appreciate that a base editing gRNA (e.g., sgRNA) or other targeting elements to generate a selected nucleic acid sequence modification in a target nucleic acid can be readily designed and implemented, e.g., based on available sequence information.

[0246] Base editing systems do not require double-stranded DNA breaks. Base editing systems do not require a donor fragment or template. Base editing systems provide precise control of the site at which the editing system modifies a target nucleic acid. Base editing systems can be multiplexed to achieve editing of multiple targets using a single editing enzyme, optionally including therapeutic targets. The present disclosure includes base editing systems that include a plurality of sgRNAs (e.g., two or more, e.g., two, three, four, or five) sgRNAs.

### I(C)(i)(b)(3). Prime Editor Payload Expression Products

[0247] The present disclosure includes, among other things, prime editing agents and systems, and nucleic acids encoding the same, e.g., where the nucleic acid is present in an adenoviral vector or genome. A prime editing system can include a prime editing enzyme and/or at least one pegRNA as components thereof. Prime editing can introduce all possible types of point mutations, small insertions, and small deletions in a precise and targeted manner. A prime editing enzyme includes a reverse transcriptase fused to a DNA binding domain that is a catalytically impaired nuclease domain (e.g., a nickase, e.g., a nickase that nicks a single strand, e.g., a non-edited strand). A reverse transcriptase is an enzyme that can synthesize a DNA molecule from an RNA template. A reverse transcriptase generally produces a DNA molecule that is complementary to the RNA template.

[0248] In particular embodiments, an editing enzyme includes an AMV reverse transcriptase, MLV reverse transcriptase, HIV-1 reverse transcriptase, or bacterial reverse transcriptase. Certain embodiments utilize an MLV reverse transcriptase domain. Reverse transcriptases of the present disclosure can have wild type amino acid sequences or engineered amino acid sequences.

[0249] Examples of reverse transcriptase enzymes include AMV reverse transcriptases (e.g., wild type AMV reverse transcriptase (RNase H plus activity), eAMV™ (engineered; RNase Hplus activity) or THermoScript™ (engineered; reduce RNAase H activity)), MLV reverse transcriptases (e.g., wild type M-MLV reverse transcriptase, GoScript™, or MultiScribe™ (RNase H plus activity), AccuScript Hi-Fi (engineered, RNase H minus (3′-5′ exonuclease activity), Affinity Script (engineered; E69K/E302R/W313F/L435G/N454K; unspecified RNase H activity), ArrayScript™ (engineered; unspecified RNase H activity), BioScript™ (engineered; reduced RNase H activity), CycleScript™ (engineered), EnzScript™ (engineered; RNase H minus), EpiScript™ (engineered; RNase H minus), Expand™ reverse transcriptase (engineered; RNase H reduced), FIREScript (engineered; RNase H plus), GrandScript (engineered; RNase H plus), iScript™ (engineered; RNase H plus), Maxima™ RT (engineered; RNase H plus and minus), MonsterScript™ (engineered; RNase H minus), PrimeScript™ (engineered; RNase H minus), PrimeScript™ II (engineered; RNase H minus), PrimeScript™ III (engineered; RNase H minus), PrimeScript™ IV (engineered; RNase H minus), ProtoScript® (Engineered; RNase H plus), ProtoScript® II (engineered; RNase H reduced), qScript (engineered; RNase H plus), RevertAid™ (engineered; RNase H plus and minus), ReverTra Ace® (engineered; RNase H minus), RevertUp II™ (engineered; RNase H minus), Rocketscript™ (engineered; RNase H plus and minus), Script (engineered; RNase H minus), SMART® (engineered), SMARTScribe™ (engineered; unspecified RNase H activity), SuperScript™ II (engineered; 524G/D583N/E562Q; RNase H reduced), SuperScript™ III (engineered; 204R/V223H/T306K/F309N/D524G/D583N/E562Q; RNase H reduced), SuperScript™ IV (engineered; RNase H reduced), or Transcriptor reverse transcriptase (engineered; RNase H plus)), an HIV-1 reverse transcriptase (e.g., HIV-1 RT (wild type of group M subtype B; RNase H plus), Biotools high retrotranscriptase (engineered group O variant (K65R/V75I); RNase H plus), or Sunscript® (engineered group O variants with changes K358R/A359G/S360A; RNase H plus and minus)), a bacterial group II intron reverse transcriptase (e.g., Marathon RT (wild type (Eubacterium rectale); lacks RNase H domain) or TGIRT®-III RT (wild type (Geobacillus stearothermophilus); lacks RNase H domain), a bacterial DNA polymerase (e.g., BcaBEST polymerase (engineered (Bacillus caldotenax DNA polymerase without 5′-3′ and 3′-5′ exonuclease activity); lacks RNase H domain), Bst 3.0 DNA polymerase (G. stearothermophilus DNA polymerase I, large fragment; lacks 5′-3′ and 3′-5′ exonuclease activity; lacks RNase H domain), RapiDxFire™ reverse transcriptase (lacks RNase H domain), Volcano2G DNA polymerase (engineered Thermus aquaticus DNA polymerase; lacks RNase H domain), or Volcano3G DNA polymerase (engineered T. aquaticus DNA polymerase; lacks RNase H domain)), SOLIScript (engineered; RNase H reduced), Omniscript® (heterodimeric RT; RNase H plus), and SensiScript® (heterodimeric RT; RNase H plus).

[0250] In various embodiments, a reverse transcriptase is a retrovirus reverse transcriptase. In various embodiments, a reverse transcriptase is a murine leukemia virus (MLV) reverse transcriptase (RT) (e.g., an engineered MLV RT). In various embodiments, a reverse transcriptase is a bacterial group II intron RT.

[0251] In various embodiments, a prime editing enzyme or system includes a reverse transcriptase associated with a DNA binding domain such as a catalytically impaired nuclease domain. In various embodiments, the DNA binding domain can localize the reverse transcriptase to a target nucleic acid in which one or more nucleotides are substituted, inserted, and/or deleted.

[0252] DNA binding domains of prime editing enzymes can be RNA guided DNA binding domains, in that an RNA guide can direct the DNA binding domain to a target nucleic acid sequence. Catalytically impaired nuclease domains of a prime editing enzyme can bind nucleic acids and can localize the reverse transcriptase enzyme to a target nucleic acid in which one or more nucleotides are substituted, inserted, and/or deleted by the prime editing system.

[0253] Any nuclease of the CRISPR system can be engineered to produce a catalytically impaired nuclease domain (e.g., a nickase) and used within a prime editing enzyme or system. Exemplary Cas nucleases include Cas1, Cas1B, Cas2, Cas3, Cas4, Cas5, Cas6, Cas7, Cas8, Cas9 (also known as Csn1 or Csx12; including, e.g., spCas9, dCas9, nCas9, and Cas9-SpRY), Cas10, Cas12 (e.g., Cas12a (e.g., LbCas12a, AsCas12a, FnCas12a, MB3Cas12a, Cas12a-M11, Cas12a-M13 (e.g., Cas12a-M13-1), Cas12a-M26 (e.g., Cas12a-M26-1), Cas12a-M28 (e.g., Cas12a-M28-1), Cas12a-M29 (e.g., Cas12a-M29-1), Cas12a-M30 (e.g., Cas12a-M30-1), Cas12a-M31 (e.g., Cas12a-M31-1), Cas12a-M32 (e.g., Cas12a-M32-1), Cas12a-M57, Cas12a-M58, Cas12a-M59, Cas12a-M60 (e.g., Cas12a-M60-9), Cas12a-M61, or Cas12a-M62), Cas12b, Cas12c, Cas12g, Cas12h, or Cas12i), Cas-Phi, CasX, CasY, C2c3, C2c2, C2c1, Csy1, Csy2, Csy3, Cse1, Cse2, Csc1, Csc2, Csa5, Csn2, Csm2, Csm3, Csm4, Csm5, Csm6, Cmr1, Cmr3, Cmr4, Cmr5, Cmr6, Cpf1, Csb1, Csb2, Csb3, Csx17, Csx14, Csx10, Csx16, CsaX, Csx3, Csx1, Csx15, Csf1, Csf2, Csf3, Csf4, and variants thereof. Numerous forms and variants of Cas nucleases are known in the art (e.g., spCas9, dCas9, nCas9, Cas9-SpRY, and Cas12a) and can have distinct characteristics, including for example recognition of distinct PAMs and PAM positions.

[0254] Other DNA binding nucleases can also be used in a prime editing enzyme. For example, prime editing systems can utilize zinc finger nucleases (ZFNs) (see, e.g., Urnov 2010 Nat Rev Genet. 11(9): 636-46) and transcription activator like effector nucleases (TALENs) (see, e.g., Joung 2013 Nat Rev Mol Cell Biol. 14(1): 49-55). For additional information regarding DNA-binding nucleases, see, e.g., US 2018/0312825.

[0255] In various embodiments, a prime editing system includes a prime editing gRNA (pegRNA) that specifies a target nucleic acid sequence and also specifies the sequence modification that the prime editing system introduces. The pegRNA includes a sequence complimentary to the target nucleic acid and recruits the prime editing enzyme to the target nucleic acid. A pegRNA includes, from 5′ to 3′: (a) a fragment that base pairs with a complementary target nucleic acid sequence (e.g., at least 80% identity between the fragment and the complement of the target nucleic acid, e.g., 80%, 85%, 90%, 91%, 92%, 93%, 94%, 95%, 96%, 97%, 98%, 99%, or 100% identity) (sometimes referred to as a “spacer”), where the fragment can be 10 to 40 nucleotides in length (e.g., equal to or about 10, 15, 16, 17, 18, 19, 20, 21, 22, 23, 24, 25, 30, 35 or 40 nucleotides in length, e.g., 17-24 or 17-20 nucleotides in length); (b) a sequence that forms a stemloop structure and binds with and/or recruits the catalytically impaired nuclease domain of a prime editing enzyme; (c) a fragment that includes a sequence that includes one or more modifications (e.g., one or more substitutions, insertions, and/or deletions) relative to the target nucleic acid sequence (sometimes referred to as a “template sequence”), and is complementary (excepting modifications) to the same target nucleic acid strand as (d); and (d) a fragment that includes a sequence complimentary to a target sequence (sometimes referred to as a “binding region” or “primer binding site” (PBS)), e.g., where the target sequence is upstream of an appropriate PAM site. In various embodiments, a PBS can be 5 to 20 nucleotides, e.g., 8 to 15 nucleotides in length. In various embodiments, a template sequence can be 10 to 20 nucleotides in length, or longer. Because pegRNAs include components characteristic of sgRNAs, they are sometimes described as extended sgRNAs. Any two fragments of a pegRNA can be, independently, associated directly or via a linker fragment.

[0256] A catalytically impaired nuclease domain of a prime editing enzyme can nick a target nucleic acid that includes an appropriate PAM to expose a 3′ flap and a 5′ flap. After nicking of the target nucleic acid, the released 3′ flap can hybridize to the PBS of the pegRNA, priming reverse transcription of the template fragment of the pegRNA that includes a modification of the target sequence, directly introducing the modification into the target nucleic acid to the 3′ flap. The product of reverse transcription, an edited 3′ flap that is “redundant” with the 5′ flap sequence produced by the nick (which includes the original, unedited sequence of the target nucleic acid), can then compete with the original and redundant 5′ flap sequence for reincorporation into the DNA duplex. Although the perfectly complimentary 5′ would likely be thermodynamically favored for hybridization to the non-edited strand, the 5′ flap is preferentially degraded by cellular endonucleases that are ubiquitous during lagging-strand DNA synthesis. After 5′ flap excision and ligation of the edited strand, permanent installation of the edit occurs through DNA repair of the non-edited that relies on the edited strand as a template. DNA repair of the non-edited strand can be promoted by contact with a secondary sgRNA that directs nicking of the non-edited strand. This additional nick stimulates re-synthesis of the non-edited strand using the edited strand as a template, resulting in a fully edited duplex. Prime editing systems can introduce any of one or more of the 12 types of point mutations (all possible nucleotide transitions and transversions), as well as insertions and/or deletions.

[0257] In various embodiments, a prime editing system is engineered to disrupt a PAM site of a target nucleic acid. Disruption of a PAM site of a target nucleic acid can reduce the probability of repeated editing of the particular target nucleic acid. In various embodiments, disruption of a PAM site in edited target nucleic acids can increase the efficiency of prime editing and/or gene therapy that includes prime editing.

[0258] Exemplary prime editing systems include PE1, PE2, and PE3. Each of these prime editing enzymes include a mutant Streptococcus pyogenes Cas9 nickase domain (H840A mutant) and a Moloney murine leukemia virus (M-MLV) reverse transcriptase (e.g., engineered to include D200N/T306K/W313F/T330P/L603W). PE1 includes a pegRNA and a prime editing enzyme that includes a Cas9 H840A nickase and wild type MLV RT. The Cas9 nickase acts only on the strand to be edited by the RT. PE2 includes pegRNA and a prime editing enzyme that includes a Cas9 H840A nickase and engineered MLV RT (D200N/T306K/W313F/T330P/L603W) demonstrated to improve editing efficiency. PE3 includes the same prime editing enzyme as PE2 (as well as a pegRNA) but further includes an sgRNA that targets the non-edited strand for nicking 14-116 nucleotides away from the site of the pegRNA-induced nick (PE3), where cellular mismatch repair pathways can fix the information introduced in the edited strand. Compared with PE2, the PE3b strategy demonstrate increased editing efficiency and lower levels of indel formation. A variant of the PE3 system called PE3b uses a nicking sgRNA that targets only the edited sequence, resulting in decreased levels of indel products by preventing nicking of the non-edited DNA strand until the other strand has been converted to the edited sequence.

[0259] Those of skill in the art will appreciate that a pegRNA or other targeting elements to generate a selected nucleic acid sequence modification in a target nucleic acid can be readily designed and implemented, e.g., based on available sequence information. Various tools for designing pegRNAs are available. For example, pegFinder is a web-based tool for pegRNA design (see, e.g., Chow 2020 Nat. Biomed. Eng. doi: 10.1038/s41551-020-00622-8). Another example of a web-based tool for pegRNA design is PrimeDesign (see, e.g., Hsu 2020 bioRxiv doi: 10.1101/2020.05.04.077750).

[0260] Prime editing systems do not require double-stranded DNA breaks. Prime editing systems provide precise control of the site at which the editing system modifies a target nucleic acid. Prime editing systems can be multiplexed to achieve editing of multiple targets using a single editing enzyme, optionally including therapeutic targets. The present disclosure includes that a prime editing system can include a plurality of pegRNAs (e.g., two or more, e.g., two, three, four, or five pegRNAs).

### I(C)(i)(b)(4). Zinc Finger Nucleases

[0261] The present disclosure includes Zinc Finger Nuclease. Zinc finger nucleases (ZFNs) are artificial restriction enzymes made by associating a sequence-targeted zinc-finger DNA-binding units with a nuclease domain (e.g., Fok1 nuclease domain) in a fusion protein. Each ZFN includes a nuclease domain (e.g., the cleavage domain of FokI) linked to an array of three to six zinc fingers zinc fingers (ZFs). For example, a ZFN can include several Cys₂His₂ ZFs in which each unit includes about 30 amino acids and specifically binds about 3 nucleotides. The ZFs provide a ZFN with the ability to bind a particular nucleic acid sequence. Because the FokI cleavage domain must dimerize to cut DNA, a monomer is not active, and cleavage does not occur at single binding sites. Thus, for example, ZFNs including three ZFs that together bind a 9-bp target function as ZFN dimers that specifically bind 18 bp of DNA per cleavage site. In some embodiments, ZFNs can include up to six ZFs per ZFN.

[0262] Cleave of a target nucleic acid by ZFNs induces cellular repair processes that can mediate modification of the nucleic acid. ZFN-induced double-strand breaks can lead to both targeted modification and targeted gene replacement. For example, if a ZFN-induced cleavage is resolved by non-homologous end joining, this can result in small deletions or insertions, which can lead to gene knockout. If a ZFN-induced cleavage is resolved by a homology-based process in the presence of a provided donor nucleic acid, small changes (e.g., one or a few nucleotides) or more (e.g., up to and including entire transgenes) can be introduced into the target nucleic acid.

### I(C)(i)(b)(5). TALENs for Modification of Nucleic Acids

[0263] The present disclosure includes Transcription Activator-Like Effector Nuclease (TALEN) editing systems. Various editing enzymes and systems can include a transcription activator-like (TAL) effector DNA binding domain and an endonuclease enzyme. An editing enzyme including a TAL effector DNA binding domain and an endonuclease can be referred to as a TALEN.

[0264] TAL effector DNA binding domains includes a plurality of monomers, each of which monomers binds one nucleotide in the target nucleic acid sequence. Each monomer includes 34 amino acids. In each monomer, positions 12 and 13 (referred to as the repeat variable diresidue, RVD) are highly variable and contribute to specific recognition of different nucleotides. The final monomer of a TAL effector DNA binding domain, which binds the nucleotide at the 3′-end of the recognition site, can be only 20 amino acids in length and therefore is sometimes referred to as a half-repeat. RVD sequences can be degenerate, as certain RVD combinations can bind to two or more nucleotides, e.g., with distinct efficiency. For example, RVDs include Asn and Ile (NI), Asn and Gly (NG), Asn and Asn (NN), and His and Asp (HD), which bind A, T, G, and C nucleotides, respectively.

[0265] In various embodiments, a TAL effector DNA binding domain is isolated from Xanthomonas spp. In various embodiments, a TALEN includes an endonuclease domain (e.g., a FokI domain), e.g., C-terminal to the TAL effector DNA binding domain.

[0266] TALENs work as pairs, the two members having target binding site on opposite DNA strands of the target nucleic acid sequence, with the targets separated by a small fragment (e.g., 12-25 bp) that can be referred to as a spacer sequence. Once a pair of TALENs have bound their target sites, the endonuclease (e.g., FokI) domains dimerize and cause a double-strand break in a spacer sequence. Non-homologous end joining (NHEJ) to resolve a DSB directly ligates DNA from either side of the double-strand break where there is very little or no sequence overlap for annealing. This repair mechanism can cause indels (insertion or deletion), or chromosomal rearrangement, which can disrupt genes at that target nucleic acid sequence. Alternatively, DNA can be introduced into a genome through NHEJ in the presence of exogenous double-stranded DNA fragments. Homology directed repair can also introduce foreign DNA at the DSB as the transfected double-stranded sequences are used as templates for the repair enzymes

### I(C)(i)(c). Small RNA Payload Expression Products

[0267] Small RNAs are short, non-coding RNA molecules that play a role in regulating gene expression. In particular embodiments, small RNAs are less than 200 nucleotides in length. In particular embodiments, small RNAs are less than 100 nucleotides in length. In particular embodiments, small RNAs are less than 50, 45, 40, 35, 30, 25, or 20 nucleotides in length. In particular embodiments, small RNAs are less than 20 nucleotides in length. In various embodiments, a small RNA has a length having a lower bound of 5, 10, 15, 20, 25, or 30 nucleotides and an upper bound of 20, 25, 30, 35, 40, 45, 50, 75, or 100 nucleotides. Small RNAs include but are not limited to microRNAs (miRNAs, Piwi-interacting RNAs (piRNAs), small interfering RNAs (siRNAs), small nucleolar RNAs (snoRNAs), tRNA-derived small RNAs (tsRNAs) small rDNA-derived RNAs (srRNAs), and small nuclear RNAs. Additional classes of small RNAs continue to be discovered.

[0268] In particular embodiments, interfering RNA molecules that are homologous to a target mRNA or to which the interfering RNA can hybridize can lead to degradation of the target mRNA molecule or reduced translation of the target mRNA, a process referred to as RNA interference (RNAi) (Carthew, Curr Opin. Cell. Biol. 13: 244-248, 2001). RNAi occurs in cells naturally to remove foreign RNAs (e.g., viral RNAs). In some instances, natural RNAi proceeds via fragments cleaved from free double-strand RNA (dsRNA) which direct the degradative mechanism to other similar RNA sequences. Alternatively, RNAi can be manufactured, for example, to silence the expression of target genes. Exemplary RNAi molecules include small hairpin RNA (shRNA, also referred to as short hairpin RNA) and small interfering RNA (siRNA).

[0269] Without limiting the disclosure, and without being bound by theory, RNA interference in nature and/or in some embodiments is typically a two-step process. In the first step, the initiation step, input dsRNA is digested into 21-23 nucleotide (nt) siRNA, probably by the action of Dicer, a member of the ribonuclease (RNase) III family of dsRNA-specific ribonucleases, which processes (cleaves) dsRNA (introduced directly or via a transgene or a virus) in an ATP-dependent manner. Successive cleavage events degrade the RNA to 19-21 base pair (bp) duplexes (siRNA), each with 2-nucleotide 3′ overhangs.

[0270] In a second step, an effector step, the siRNA duplexes bind to a nuclease complex to form the RNA-induced silencing complex (RISC). An ATP-dependent unwinding of the siRNA duplex is required for activation of the RISC. The active RISC then targets the homologous transcript by base pairing interactions and typically cleaves the mRNA into 12 nucleotide fragments from the 3′ terminus of the siRNA. Research indicates that each RISC contains a single siRNA and an RNase.

[0271] Because of the remarkable potency of RNAi, an amplification step within the RNAi pathway has been suggested. Amplification could occur by copying of the input dsRNAs which would generate more siRNAs, or by replication of the siRNAs formed. Alternatively or additionally, amplification could be effected by multiple turnover events of the RISC.

[0272] ShRNAs are single-stranded polynucleotides with a hairpin loop structure. The single-stranded polynucleotide has a loop segment linking the 3′ end of one strand in the double-stranded region and the 5′ end of the other strand in the double-stranded region. The double-stranded region is formed from a first sequence that is hybridizable to a target sequence, such as a polynucleotide encoding transgene, and a second sequence that is complementary to the first sequence, thus the first and second sequence form a double stranded region to which the linking sequence connects the ends of to form the hairpin loop structure. The first sequence can be hybridizable to any portion of a polynucleotide encoding transgene. The double-stranded stem domain of the shRNA can include a restriction endonuclease site.

[0273] Transcription of shRNAs is initiated at a polymerase III (Pol III) promoter and is thought to be terminated at position 2 of a 4-5-thymine transcription termination site. Upon expression, shRNAs are thought to fold into a stem-loop structure with 3′ UU-overhangs; subsequently, the ends of these shRNAs are processed, converting the shRNAs into siRNA-like molecules of 21-23 nucleotides.

[0274] The stem-loop structure of shRNAs can have optional nucleotide overhangs, such as 2-bp overhangs, for example, 3′ UU overhangs. While there may be variation, stems typically range from 15 to 49, 15 to 35, 19 to 35, 21 to 31 bp, or 21 to 29 bp, and the loops can range from 4 to 30 bp, for example, 4 to 23 bp. In particular embodiments, shRNA sequences include 45-65 bp; 50-60 bp; or 51, 52, 53, 54, 55, 56, 57, 58, or 59 bp. In particular embodiments, shRNA sequences include 52 or 55 bp. In particular embodiments, siRNAs have 15-25 bp. In particular embodiments, siRNAs have 16, 17, 18, 19, 20, 21, 22, 23, or 24 bp. In particular embodiments, siRNAs have 19 bp. The skilled artisan will appreciate, however, that siRNAs having a length of less than 16 nucleotides or greater than 24 nucleotides can also function to mediate RNAi. Longer RNAi agents have been demonstrated to elicit an interferon or Protein kinase R (PKR) response in certain mammalian cells which may be undesirable. Preferably the RNAi agents do not elicit a PKR response (i.e., are of a sufficiently short length). However, longer RNAi agents may be useful, for example, in situations where the PKR response has been downregulated or dampened by alternative means.

[0275] In certain illustrative embodiments, the present disclosure includes an adenoviral vector payload that encodes an shRNA targeted to the gene encoding BCL11A, where the shRNA causes decreased translation of BCL11A.

### I(C)(ii). Payload Regulatory Sequences

[0276] Promoters can include general promoters, tissue-specific promoters, cell-specific promoters, and/or promoters specific for the cytoplasm. Promoters may include strong promoters, weak promoters, constitutive expression promoters, and/or inducible (conditional) promoters. Inducible promoters direct or control expression in response to certain conditions, signals, or cellular events. For example, a promoter can be an inducible promoter that requires a particular ligand, small molecule, transcription factor, hormone, or hormone protein in order to effect transcription from the promoter

[0277] In various embodiments, a promoter sequence can be a native promoter sequence. A native promoter sequence, or minimal promoter sequence, can refer to a sequence derived from a single contiguous sequence positioned 5′ of a coding sequence in a reference genome. A native promoter sequence can include a core promoter and an associated 5′UTR. In particular embodiments, a 5′UTR can include an intron. In various embodiments, a promoter sequence can be a composite promoter sequence. In various embodiments, a composite promoter sequence can refer to a promoter sequence that includes portions derived from at least two distinct sources, e.g., from two non-contiguous portions of a reference genome, from two distinct genomes, or from any two distinct source sequences. For example, in certain embodiments, a composite promoter sequence includes a sequence derived from a single contiguous sequence positioned 5′ of a coding sequence in a reference genome and a sequence derived from another portion of the reference genome, e.g., an enhancer (e.g., a distal enhancer).

[0278] In particular embodiments, a promoter can be a wild type promoter sequence or a sequence with one or more changes relative to a reference promoter (e.g., one or more insertions, point mutations, or deletions). In particular embodiments, a promoter sequence differs from a wild type or other reference promoter sequence by having 1 change per 20 nucleotide stretch, 2 changes per 20 nucleotide stretch, 3 changes per 20 nucleotide stretch, 4 changes per 20 nucleotide stretch, or 5 changes per 20 nucleotide stretch. In particular embodiments, a promoter sequence can differ from a wild type or reference sequence by 1, 2, 3, 4, 5, 6, 7, 8, 9, or 10 nucleotide differences. A promoter can have a length of, e.g., 50 to 3,000 or more nucleotides, e.g., 100-1,000, 100-2,000, 100-3,000, 500-1,000, 500-2,000, 500-3,000, 1,000-2,000, or 1,000-3,000 nucleotides.

[0279] In various embodiments, a promoter is non-specific in that it causes expression of an operably linked coding sequence in cells or tissues of diverse types. In various embodiments, a promoter is a ubiquitous promoter. In various embodiments, a ubiquitous promoter can be selected from, e.g., a CMV promoter, RSV promoter, or SV40 promoter.

[0280] Coding sequences of the present disclosure can additionally be associated with sequences that enhance the stability of mRNA transcripts, such as an insulator and/or a polyA tail.

### I(C)(iii). Selection Sequences

[0281] In particular embodiments, vectors include a selection element including a selection cassette. In particular embodiments, a selection cassette includes a promoter, a cDNA that adds or confers resistance to a selection agent, and a poly A sequence that enables stopping the transcription of this independent transcriptional element.

[0282] A selection cassette can encode one or more proteins that (a) confer resistance to antibiotics or other toxins, (b) complement auxotrophic deficiencies, or (c) supply critical nutrients not available from complex media, e.g., the gene encoding D-alanine racemase for Bacilli. Any number of selection systems may be used to recover transformed cell lines. In particular embodiments, a positive selection cassette includes resistance genes to neomycin, hygromycin, ampicillin, puromycin, phleomycin, zeomycin, blasticidin, or viomycin. In particular embodiments, a positive selection cassette includes the DHFR (dihydrofolate reductase) gene providing resistance to methotrexate, the MGMT^{P140K} gene responsible for the resistance to O⁶BG/BCNU, the HPRT (Hypoxanthine phosphoribosyl transferase) gene responsible for the transformation of specific bases present in the HAT selection medium (aminopterin, hypoxanthine, thymidine), and other genes for detoxification with respect to some drugs. In particular embodiments, the selection agent includes neomycin, hygromycin, puromycin, phleomycin, zeomycin, blasticidin, viomycin, ampicillin, O⁶BG/BCNU, methotrexate, tetracycline, aminopterin, hypoxanthine, thymidine kinase, DHFR, Gln synthetase, or ADA.

[0283] In particular embodiments, a negative selection cassette includes a gene encoding an expression product that transforms a substrate present in (e.g., delivered to) a subject or system (e.g., a culture medium) into a toxic substance, thereby sensitizing cells that expresses the gene. In various embodiments, for example, a payload is engineered such that proper integration into a target genome disrupts expression of the negative selection gene. A negative selection cassette can include a gene encoding diphtheria toxin A-fragment (DTA) (Yagi et al., Anal Biochem. 214(1): 77-86, 1993; Yanagawa et al., Transgenic Res. 8(3): 215-221, 1999) or a thymidine kinase gene of the Herpes virus (HSV TK) sensitive to the presence of ganciclovir or FIAU. In various embodiments, a negative selection cassette includes an HPRT gene for negative selection in the presence of 6-thioguanine (6TG).

[0284] In particular embodiments, a selection cassette includes MGMT^{P140K} as described in Olszko et al. (Gene Therapy 22: 591-595, 2015). In particular elements, the selection agent includes O⁶BG/BCNU.

[0285] The MGMT gene encodes human alkyl guanine transferase (hAGT), a DNA repair protein that confers resistance to the cytotoxic effects of alkylating agents, such as nitrosoureas and temozolomide (TMZ). 6-benzylguanine (6-BG) is an inhibitor of AGT that potentiates nitrosourea toxicity and is co-administered with TMZ to potentiate the cytotoxic effects of this agent. Several mutant forms of MGMT that encode variants of AGT are highly resistant to inactivation by 6-BG but retain their ability to repair DNA damage (Maze et al., J. Pharmacol. Exp. Ther 290: 1467-1474, 1999). MGMT^{P140K}-based drug resistant gene therapy has been shown to confer chemoprotection to mouse, canine, rhesus macaques, and human cells, specifically hematopoietic cells (Zielske et al., J. Clin. Invest. 112: 1561-1570, 2003; Pollok et al., Hum. Gene Ther 14: 1703-1714, 2003; Gerull et al., Hum. Gene Ther. 18: 451-456, 2007; Neff et al., Blood 105: 997-1002, 2005; Larochelle et al., J. Clin. Invest. 119: 1952-1963, 2009; Sawai et al., Mol. Ther. 3: 78-87, 2001).

[0286] In particular embodiments, combination with an in vivo selection cassette will be a critical component for diseases without a selective advantage of gene-corrected cells. For example, in SCID and some other immunodeficiencies and FA, corrected cells have an advantage and only transducing the therapeutic gene into a “few” HSPCs is sufficient for therapeutic efficacy. For other diseases like hemoglobinopathies (i.e., sickle cell disease and thalassemia) in which therapeutically modified cells do not demonstrate a competitive advantage, in vivo selection of the modified cells, e.g., for expression of an in vivo selection cassette such as MGMT^{P140K}, will select for the few transduced HSPCs, allowing an increase in the gene corrected cells and in order to achieve therapeutic efficacy. This approach can also be applied to HIV by making HSPCs resistant to HIV in vivo rather than ex vivo genetic modification.

### I(C)(iv). Stuffer Sequences

[0287] In particular embodiments, the vector includes a stuffer sequence. In particular embodiments, the stuffer sequence may be added to render the genome at a size near that of wild-type length. Stuffer is a term generally recognized in the art intended to define functionally inert sequence intended to extend the length of the genome.

[0288] The stuffer sequence is used to achieve efficient packaging and stability of the vector. In particular embodiments, the stuffer sequence is used to render the genome size between 70% and 110% of that of the wild type virus.

[0289] The stuffer sequences can be any DNA, preferably of mammalian origin. In a preferred embodiment of the invention, stuffer sequences are non-coding sequences of mammalian origin, for example intronic fragments.

[0290] The stuffer sequence, when used to keep the size of the vector a predetermined size, can be any non-coding sequence or sequence that allows the genome to remain stable in dividing or nondividing cells. These sequences can be derived from other viral genomes (e.g. Epstein bar virus) or organism (e.g. yeast). For example, these sequences could be a functional part of centromeres and/or telomeres.

### I(C)(v). Payload Integration and Support Vectors

[0291] Gene therapy often requires integration of a desired nucleic acid payload into the genome of a target cell. A variety of systems can be designed and/or used for integration of a payload into a host or target cell genome. Various such systems can include one or more of certain payload sequence features and support vectors and support genomes (support genomes).

[0292] One means of engineering adenoviral vectors that integrate a payload into a host cell genome has been to produce integrating viral hybrid vectors. Integrating viral hybrid vectors combine genetic elements of a vector that efficiently transduces target cells with genetic elements of a vector that stably integrates its vector payload. Integration elements of interest, e.g., for use in combination with adenoviral vectors, have included those of bacteriophage integrase PHiC31, retrotransposons, retrovirus (e.g., LTR-mediated or retrovirus integrate-mediated), zinc-finger nuclease, DNA-binding domain-retroviral integrase fusion proteins, AAV (e.g., AAV-ITR or AAV-Rep protein-mediated), and Sleeping Beauty (SB) transposase.

[0293] Ad3, 5, 7, 11, 14, 16, 21, 34, 35, 37, or 50 vectors described herein can optionally include transposable elements including transposases and transposons. Transposases can include integrases from retrotransposons or of retroviral origin, as well as an enzyme that is a component of a functional nucleic acid-protein complex capable of transposition and which is mediating transposition. A transposition reaction includes a transposon and a transposase or an integrase enzyme. In particular embodiments, the efficiency of integration, the size of the DNA sequence that can be integrated, and the number of copies of a DNA sequence that can be integrated into a genome can be improved by using such transposable elements. Transposons include a short nucleic acid sequence with terminal repeat sequences upstream and downstream of a larger segment of DNA. Transposases bind the terminal repeat sequences and catalyze the movement of the transposon to another portion of the genome.

[0294] A number of transposases have been described in the art that facilitate insertion of nucleic acids into the genome of vertebrates, including humans. Examples of such transposases include sleeping beauty (“SB”, e.g., derived from the genome of salmonid fish); piggyback (e.g., derived from lepidopteran cells and/or the Myotis lucifugus); mariner (e.g., derived from Drosophila); frog prince (e.g., derived from Rana pipiens); Tol1; Tol2 (e.g., derived from medaka fish); TcBuster (e.g., derived from the red flour beetle Tribolium castaneum), Helraiser, Himar1, Passport, Minos, Ac/Ds, PIF, Harbinger, Harbinger3-DR, HSmar1, and spinON.

[0295] The PiggyBac (PB) transposase is a compact functional transposase protein that is described in, for example, Fraser et al., Insect Mol. Biol., 1996, 5, 141-51; Mitra et al., EMBO J., 2008, 27, 1097-1109; Ding et al., Cell, 2005, 122, 473-83; and U.S. Pat. Nos. 6,218,185; 6,551,825; 6,962,810; 7,105,343; and 7,932,088. Hyperactive piggyBac transposases are described in U.S. Pat. No. 10,131,885.

[0296] Additional information on DNA transposons can be found, for instance, in Muñoz-López & García Pérez, Curr Genomics, 11(2):115-128, 2010.

[0297] Sleeping Beauty is described in Ivics et al. Cell 91, 501-510, 1997; Izsvak et al., J. Mol. Biol., 302(1):93-102, 2000; Geurts et al., Molecular Therapy, 8(1): 108-117, 2003; Mates et al. Nature Genetics 41:753-761, 2009; and U.S. Pat. Nos. 6,489,458; 7,148,203; and 7,160,682; US Publication Nos. 2011/117072; 2004/077572; and 2006/252140. In certain embodiments, the Sleeping Beauty transposase enzyme is a Hyperactive Sleeping Beauty SB100x transposase enzyme. SB transposons are most efficiently transposed when present in circularized nucleic acid molecules (Yant et al., Nature Biotechnology, 20: 999-1005, 2002).

[0298] Systematic mutagenesis studies have been undertaken to increase the activity of the SB transposase. For example, Yant et al. undertook the systematic exchange of the N-terminal 95 AA of the SB transposase for alanine (Mol. Cell Biol. 24: 9239-9247, 2004). Ten of these substitutions caused hyperactivity between 200-400% as compared to SB10 as a reference. SB16, described in Baus et al. (Mol. Therapy 12: 1148-1156, 2005) was reported to have a 16-fold activity increase as compared to SB10. Additional hyperactive SB variants are described in Zayed et al. (Molecular Therapy 9(2):292-304, 2004) and U.S. Pat. No. 9,840,696.

[0299] SB transposases transpose nucleic acid transposon payloads that are positioned between SB ITRs. Various SB ITRs are known in the art. In some embodiments, an SB ITR is a 230 bp sequence including imperfect direct repeats of 32 bp in length that serve as recognition signals for the transposase.

[0300] In various embodiments, an Ad3, 5, 7, 11, 14, 16, 21, 34, 35, 37, or 50 donor vector or genome includes a payload that includes SB100x transposon inverted repeats that flank an integration element that includes at least one coding sequence that encodes a β-globin expression product or a γ-globin expression product.

[0301] In various embodiments, an adenoviral transposition system includes an Ad3, 5, 7, 11, 14, 16, 21, 34, 35, 37, or 50 donor vector or genome that includes an integration element flanked by transposon inverted repeats, and can further include an adenoviral support vector or support genome. In various embodiments, a support vector includes (i) the adenoviral capsid; and (ii) an adenoviral support genome including a nucleic acid sequence encoding a transposase that corresponds to the inverted repeats that flank the integration element. Accordingly, in various embodiments, at least one function of a support vector or support genome can be to encode, express, and/or deliver to a target cell a transposase for transposition of an integration element present in a donor vector administered to the target cell. For instance, in some embodiments, an Ad3, 5, 7, 11, 14, 16, 21, 34, 35, 37, or 50 donor vector or genome includes SB100x transposon inverted repeats that flank an integration element that includes at least one coding sequence that encodes a β-globin expression product or a γ-globin expression product, and a support vector or support genome includes a coding sequence that encodes SB100x transposase. In certain embodiments, an integration element is flanked by recombinase direct repeats, e.g., where the integration element is flanked by transposon inverted repeats and the transposon inverted repeats are flanked by recombinase direct repeats. In certain such embodiments, at least one function of a support vector or support genome can be to encode, express, and/or deliver to a target cell a recombinase for recombination of recombinase sites present in a donor vector administered to the target cell. In various embodiments, a support vector or support genome can encode, express, and/or deliver to a target cell a recombinase for recombination of recombinase sites present in a donor vector administered to the target cell and also encode, express, and/or deliver to a target cell a transposase for transposition of an integration element present in a donor vector administered to the target cell.

[0302] Particular embodiments disclosed herein also use site-specific recombinase systems. In these embodiments, in addition to at least one therapeutic gene, the transposon including transposase-recognized inverted repeats also includes at least one recombinase-recognized site. Thus, in particular embodiments, The present disclosure also provides methods of integrating a therapeutic gene into the genome including administering: (a) a transposon including the therapeutic gene, where the therapeutic gene is flanked by (i) an inverted repeat sequence recognized by a transposase and (ii) a recombinase-recognized site; and b) a transposase and recombinase that serve to excise the therapeutic gene from a plasmid, episome, or transgene and integrate the therapeutic gene into the genome. In some embodiments, the protein(s) of (b) are administered as a nucleic acid encoding the protein(s). In some embodiments, the transposon and the nucleic acids encoding the protein(s) of (b) are present on separate vectors. In some embodiments, the transposon and nucleic acid encoding the protein(s) of (b) are present on the same vector. When present on the same vector, the portion of the vector encoding the protein(s) of (b) are located outside the portion carrying the transposon of (a). In other words, the transposase and/or recombinase encoding region is located external to the region flanked by the inverted repeats and/or recombinase-recognition site. In the aforementioned methods, the transposase protein recognizes the inverted repeats that flank an inserted nucleic acid, such as a nucleic acid that is to be inserted into a target cell genome. The use of recombinases and recombinase-recognized sites can increase the size of a transposon that can be integrated into a genome further.

[0303] Examples of recombinase systems include the Flp/Frt system, the Cre/loxP system, the Dre/rox system, the Vika/vox system, and the PhiC31 system. The Flp/Frt DNA recombinase system was isolated from Saccharomyces cerevisiae. The Flp/Frt system includes the recombinase Flp (flippase) that catalyzes DNA-recombination on its Frt recognition sites. Variants of the Flp protein include GenBank accession no. ABD57356.1 and GenBank accession no. ANW61888.1.

[0304] The Cre/loxP system is described in, for example, EP 02200009B1. Cre is a site-specific DNA recombinase isolated from bacteriophage P1. The recognition site of the Cre protein is a nucleotide sequence of 34 base pairs, the loxP site. Cre recombines the 34 bp loxP DNA sequence by binding to the 13 base pair inverted repeats and catalyzing strand cleavage and re-ligation within the spacer region. The staggered DNA cuts made by Cre in the spacer region are separated by 6 base pairs to give an overlap region that acts as a homology sensor to ensure that only recombination sites having the same overlap region recombine. Variants of the lox recognition site that can also be used include: lox2272; lox511; lox66; lox71; loxM2; and lox5171. The VCre/VloxP recombinase system was isolated from Vibrio plasmid p0908. The sCre/SloxP system is described in WO 2010/143606. The Dre/rox system is described in U.S. Pat. Nos. 7,422,889 and 7,915,037B2. It generally includes a Dre recombinase isolated from Enterobacteria phage D6 and the rox recognition site. The Vika/vox system is described in U.S. Pat. No. 10,253,332. Additionally, the PhiC31 recombinase recognizes the AttB/AttP binding sites.

[0305] The amount of vector nucleic acid including the transposon (including inverted repeats and/or recombinase recognition sites), and in various embodiments the amount of vector nucleic acid encoding the transposase and/or recombinase, introduced into the cell is/are sufficient to provide for the desired excision and insertion of the transposon nucleic acid into the target cell genome. As such, the amount of vector nucleic acid introduced should provide for a sufficient amount of transposase activity and/or recombinase activity and a sufficient copy number of the transposon that is desired to be inserted into the target cell genome. Particular embodiments include a 1:1; 1:2; or 1:3 ratio of transposon to transposase/recombinase.

[0306] The subject methods result in stable integration of the nucleic acid into the target cell genome. By stable integration is meant that the nucleic acid remains present in the target cell genome for more than a transient period of time and passes on a part of the chromosomal genetic material to the progeny of the target cell.

[0307] As indicated previously, particular embodiments utilize homology arms to facilitate targeted insertion of genetic constructs utilizing homology directed repair. Homology arms can be any length with sufficient homology to a genomic sequence at a cleavage site, e.g. 70%, 80%, 85%, 90%, 95%, or 100% homology with the nucleotide sequences flanking the cleavage site, e.g., within 50 bases or less of the cleavage site, e.g., within 30 bases, within 15 bases, within 10 bases, within 5 bases, or immediately flanking the cleavage site, to support HDR between it and the genomic sequence to which it bears homology. Homology arms are generally identical to the genomic sequence, for example, to the genomic region in which the double stranded break (DSB) occurs. However, as indicated, absolute identity is not required.

[0308] Particular embodiments can utilize homology arms with 25, 50, 100, or 200 nucleotides (nt), or more than 200 nt of sequence homology between a homology-directed repair template and a targeted genomic sequence (or any integral value between 10 and 200 nucleotides, or more). In particular embodiments, homology arms are 40-1000 nt in length. In particular embodiments, homology arms are 500-2500 base pairs, 700-2000 base pairs, or 800-1800 base pairs. In particular embodiments, homology arms include at least 800 base pairs or at least 850 base pairs. The length of homology arms can also be symmetric or asymmetric.

[0309] Particular embodiment can utilize first and/or second homology arms each including at least 25, 50, 100, 200, 400, 600, 800, 1,000, 1,200, 1,400, 1,600, 1,800, 2,000, 2,500, or 3,000 nucleotides or more, having sequence identity or homology with a corresponding fragment of a target genome. In some embodiments, first and/or second homology arms each include a number of nucleotides having sequence identity or homology with a corresponding fragment of a target genome that has a lower bound of 25, 50, 100, 200, 400, 600, 800, 1,000, 1,200, 1,400, 1,600, or 1,800 nucleotides and an upper bound of 1,000, 1,200, 1,400, 1,600, 1,800, 2,000, 2,500, or 3,000 nucleotides. In some embodiments, first and/or second homology arms each include a number of nucleotides having sequence identity or homology with a corresponding fragment of a target genome that is between 40 and 1,000 nucleotides, between 500 and 2,500 nucleotides, between 700 and 2,000 nucleotides, or between 800 and 1800 nucleotides, or that has a length of at least 800 nucleotides or at least 850 nucleotides. First and second homology arms can have same, similar, or different lengths.

[0310] For additional information regarding homology arms, see Richardson et al., Nat Biotechnol. 34(3):339-44, 2016.

[0311] In particular embodiments, genetic constructs (e.g., genes leading to expression of a therapeutic product within a cell) are precisely inserted within genomic safe harbors. Genomic safe harbor sites are intragenic or extragenic regions of the genome that are able to accommodate the predictable expression of newly integrated DNA without adverse effects on the host cell. A useful safe harbor must permit sufficient transgene expression to yield desired levels of the encoded protein. A genomic safe harbor site also must not alter cellular functions. Methods for identifying genomic safe harbor sites are described in Sadelain et al., Nature Reviews 12:51-58, 2012; and Papapetrou et al., Nat Biotechnol. 29(1):73-8, 2011. In particular embodiments, a genomic safe harbor site meets one or more (one, two, three, four, or five) of the following criteria: (i) distance of at least 50 kb from the 5′ end of any gene, (ii) distance of at least 300 kb from any cancer-related gene, (iii) within an open/accessible chromatin structure (measured by DNA cleavage with natural or engineered nucleases), (iv) location outside a gene transcription unit and (v) location outside ultraconserved regions (UCRs), microRNA or long non-coding RNA of the genome.

[0312] In particular embodiments, to meet the criteria of a genomic safe harbor, chromatin sites must be >150 kb away from a known oncogene, >30 kb away from a known transcription start site; and have no overlap with coding mRNA. In particular embodiments, to meet the criteria of a genomic safe harbor, chromatin sites must be >200 kb away from a known oncogene, >40 kb away from a known transcription start site; and have no overlap with coding mRNA. In particular embodiments, to meet the criteria of a genomic safe harbor, chromatin sites must be >300 kb away from a known oncogene, >50 kb away from a known transcription start site; and have no overlap with coding mRNA. In particular embodiments, a genomic safe harbor meets the preceding criteria (>150 kb, >200 kb or >300 kb away from a known transcription start site; and have no overlap with coding mRNA >40 kb, or >50 kb away from a known transcription start site with no overlap with coding mRNA) and additionally is 100% homologous between an animal of a relevant animal model and the human genome to permit rapid clinical translation of relevant findings.

[0313] In particular embodiments, a genomic safe harbor meets criteria described herein and also demonstrates a 1:1 ratio of forward:reverse orientations of lentiviral integration further demonstrating the locus does not impact surrounding genetic material.

[0314] Particular genomic safe harbors sites include CCR5, HPRT, AAVS1, Rosa and albumin. See also, e.g., U.S. Pat. Nos. 7,951,925 and 8,110,379; U.S. Publication Nos. 2008/0159996; 2010/00218264; 2012/0017290; 2011/0265198; 2013/0137104; 2013/0122591; 2013/0177983 and 2013/0177960 for additional information and options for appropriate genomic safe harbor integration sites.

[0315] Various technologies known in the art can be used to direct integration of an integration element at specific genomic loci such as genomic safe harbors. For example AAV-mediated gene targeting, as well as homologous recombination enhanced by the introduction of DNA double-strand breaks using site-specific endonucleases (zinc-finger nucleases, meganucleases, transcription activator-like effector (TALE) nucleases), and CRISPR/Cas systems are all tools that can mediate targeted insertion of foreign DNA at predetermined genomic loci such as genomic safe harbors.

[0316] In certain embodiments, integration of an integration element at specific genomic loci such as genomic safe harbors can include homology-directed integration using CRISPR enzyme-mediated cleavage of a target genome. CRISPR enzyme (e.g., Cas9) cleaves double stranded DNA at a site specified by a guide RNA (gRNA). The double strand break can be repaired by homology-directed repair (HDR) when a donor template (such as an Ad3, 5, 7, 11, 14, 16, 21, 34, 35, 37, or 50 payload integration element including left and right homology arms) is present. In various such methods, an integration element is a “repair template” in that it includes left and right homology arms (e.g., of 500-3,000 bp) for insertion into a cleaved target genome. CRISPR-mediated gene insertion can be several orders of magnitude more efficient compared with spontaneous recombination of DNA template, demonstrating that CRISPR-mediated gene insertion can be an effective tool for genome editing. Exemplary methods of homology-directed integration of a nucleic acid sequence into a specified genomic locus are known in the art, e.g., in Richardson et al. (Nat Biotechnol. 34(3):339-44, 2016).

### II. Target Cell Populations

[0317] In various embodiments, donor vectors and genomes of the present disclosure can selectively target (e.g., selectively enter and/or selectively transduce) one or more hematopoietic cell types disclosed herein. Selective targeting includes, without limitation, preferential targeting (e.g., binding, entry, transduction, and/or modification) of one or more cell types as compared to one or more reference cell types. In various embodiments, the one or more preferentially targeted cell types are, or include one or more of, hematopoietic cell types disclosed herein. In various embodiments, the one or more reference cell types are, or include one or more of, hematopoietic cell types disclosed herein. In various embodiments, none of the reference cell types are the same as any of the preferentially targeted cell types. Accordingly, reference to a vector selectively targeting a hematopoietic cell type can, but does not necessarily, mean or imply, that the vector does not also target (e.g., selectively target) one or more other hematopoietic cell types. In various embodiments, preferential targeting refers specifically to the comparison of one single hematopoietic cell type to a reference group including two or more hematopoietic cell types. In various embodiments, preferential targeting refers specifically to the comparison of a group including two or more hematopoietic cell types to a single reference hematopoietic cell type. In various embodiments, preferential targeting refers specifically to the comparison of a group including two or more hematopoietic cell types to a reference group including two or more hematopoietic cell types. In various embodiments, a hematopoietic cell type is a stem cell type, a progenitor cell type, or a further differentiated cell type (e.g., a terminally differentiated cell type). In various embodiments, a group of hematopoietic cell types can be stem cells, progenitor cells, or cells of a particular lineage, e.g., a lineage identified by the least differentiated member of the identified group of cells and including one or more or all more differentiated hematopoietic cells derived therefrom. Selective targeting includes but does not require that preferentially targeted hematopoietic cell type(s) are preferentially targeted as compared to all other hematopoietic cell types. In various embodiments, selective targeting includes infection and/or transduction of at least 0.1%, at least 0.2%, at least 0.3%, at least 0.4%, at least 0.5%, at least 0.6%, at least 0.7%, at least 0.8%, at least 0.9%, at least 1%, at least 5%, at least 10%, at least 15%, at least 20%, at least 25% at least 30%, at least 35%, at least 40%, at least 45%, at least 50%, at least 55%, at least 60%, at least 65%, at least 70%, at least 75%, at least 80%, at least 85%, at least 90%, or at least 95% of the cells in a population of cells of the preferentially targeted hematopoietic cell type.

[0318] Hematopoietic cell types (e.g., target hematopoietic cell types) of the present disclosure include hematopoietic cells of all lineages and stages of hematopoietic cell differentiation. Target cell types of the present disclosure include, without limitation, HSCs (e.g., CD34⁺ long-term (LT)-HSCs and/or CD34⁺ short-erm (ST)-HSCs), common lymphoid progenitors (CLPs), T cells, NK cells, colony forming unit (CFU)-pre B cells, B cells, common myeloid progenitors (CMPs), granulocyte-macrophage progenitors (GMPs), CFU-M cells, monoblasts, monocytes, macrophages, CFU-G cells, myeloblasts, granulocytes, neutrophils, eosinophils, basophils, megakaryocyte-erythrocyte progenitors (MEPs), BFU-E cells, CFU-E cells, erythroblasts, erythrocytes, CFU-Mk cells, megakaryocytes, and/or platelets. Hematopoietic cell types (e.g., target hematopoietic cell types) of the present disclosure include CD34⁺ hematopoietic cells.

[0319] HSCs can be targeted for in vivo genetic modification by binding CD46. HSCs or subsets thereof can also be identified by any of the following marker profiles: CD34+; Lin−/CD34+/CD38−/CD45RA−/CD90+/CD49f+ (HSC1); CD34+/CD38−/CD45RA−/CD90−/CD49f+/(HSC2). In various embodiments, human HSC1 can be identified by any of the following profiles: CD34+/CD38−/CD45RA−/CD90+ or CD34+/CD45RA−/CD90+ and mouse LT-HSC can be identified by Lin-Sca1+ckit+CD150+CD48−Flt3−CD34− (where Lin represents the absence of expression of any marker of mature cells including CD3, CD4, CD8, CD11b, CD11c, NK1.1, Gr1, and TER119). In particular embodiments, HSC are identified by a CD164+ profile. In particular embodiments, HSC are identified by a CD34+/CD164+ profile. For additional information regarding HSC marker profiles, see WO2017/218948.

[0320] Hematopoietic cells can be beneficially caused to encode and/or express various payloads provided herein, including without limitation TCRs and CARs (see, e.g., Gschweng et al. Immunol Rev. 2014 January; 257(1): 237-249).

[0321] Hematopoietic cell types that can be targeted by vectors of the present disclosure include T cells. Several different subsets of T-cells have been discovered, each with a distinct function. For example, a majority of T-cells have a T-cell receptor (TCR) existing as a complex of several proteins. The actual T-cell receptor is composed of two separate peptide chains, which are produced from the independent T-cell receptor alpha and beta (TCRα and TCRβ) genes and are called α- and β-TCR chains.

[0322] γδ T-cells represent a small subset of T-cells that possess a distinct T-cell receptor (TCR) on their surface. In γδ T-cells, the TCR is made up of one γ-chain and one δ-chain. This group of T-cells is much less common (2% of total T-cells) than the αβ T-cells.

[0323] CD3 is expressed on all mature T cells. Activated T-cells express 4-1BB (CD137), CD69, and CD25. CD5 and transferrin receptor are also expressed on T-cells.

[0324] T-cells can further be classified into helper cells (CD4+ T-cells) and cytotoxic T-cells (CTLs, CD8+ T-cells), which include cytolytic T-cells. T helper cells assist other white blood cells in immunologic processes, including maturation of B cells into plasma cells and activation of cytotoxic T-cells and macrophages, among other functions. These cells are also known as CD4+ T-cells because they express the CD4 protein on their surface. Helper T-cells become activated when they are presented with peptide antigens by MHC class II molecules that are expressed on the surface of antigen presenting cells (APCs). Once activated, they divide rapidly and secrete small proteins called cytokines that regulate or assist in the active immune response.

[0325] Cytotoxic T-cells destroy virally infected cells and tumor cells, and are also implicated in transplant rejection. These cells are also known as CD8+ T-cells because they express the CD8 glycoprotein on their surface. These cells recognize their targets by binding to antigen associated with MHC class I, which is present on the surface of nearly every cell of the body.

[0326] In particular embodiments, CARs are genetically modified to be expressed in cytotoxic T-cells.

[0327] “Central memory” T-cells (or “TCM”) as used herein refers to an antigen experienced CTL that expresses CD62L or CCR7 and CD45RO on the surface thereof, and does not express or has decreased expression of CD45RA as compared to naive cells. In particular embodiments, central memory cells are positive for expression of CD62L, CCR7, CD25, CD127, CD45RO, and CD95, and have decreased expression of CD45RA as compared to naive cells.

[0328] “Effector memory” T-cell (or “TEM”) as used herein refers to an antigen experienced T-cell that does not express or has decreased expression of CD62L on the surface thereof as compared to central memory cells and does not express or has decreased expression of CD45RA as compared to a naive cell. In particular embodiments, effector memory cells are negative for expression of CD62L and CCR7, compared to naive cells or central memory cells, and have variable expression of CD28 and CD45RA. Effector T-cells are positive for granzyme B and perforin as compared to memory or naive T-cells.

[0329] “Naive” T-cells as used herein refers to a non-antigen experienced T cell that expresses CD62L and CD45RA and does not express CD45RO as compared to central or effector memory cells. In particular embodiments, naive CD8+ T lymphocytes are characterized by the expression of phenotypic markers of naive T-cells including CD62L, CCR7, CD28, CD127, and CD45RA.

[0330] Hematopoietic cell types that can be targeted by vectors of the present disclosure include B cells. B cells are mediators of the humoral response and are responsible for production and release of antibodies specific to an antigen. Several types of B cells exist which can be characterized by key markers. In general, immature B cells express CD19, CD20, CD34, CD38, and CD45R, and as they mature the key expressed markers are CD19 and IgM.

[0331] For avoidance of doubt, in various embodiments, vectors and genomes of the present disclosure can infect and/or transduce, and/or selectively target, CD11+/CD14+ monocytes, CD3+ T cells, CD3−/CD56+ NK cells, and/or CD20+ B cells. In various embodiments, CD11+/CD14+ monocytes and/or a CD11+/CD14+ phenotype can refer to cells found to express CD11 and CD14, e.g., based on binding of cells with a labelled anti-CD11 antibody and a labelled anti-CD14 antibody, e.g., as set forth in Example 10 and/or FIG. 14. In various embodiments, CD3+ T cells and/or a CD3+ phenotype can refer to cells found to express CD3, e.g., based on binding of cells with a labelled anti-CD3 antibody, e.g., as set forth in Example 10 and/or FIG. 14. In various embodiments, CD3−/CD56+NK cells and/or a CD3-/CD56+ phenotype can refer to cells found to express CD56 and not express CD3, e.g., based on binding of cells with a labelled anti-CD56 antibody and absence of binding of cells with a labelled anti-CD3 antibody, e.g., as set forth in Example 10 and/or FIG. 14. In various embodiments, CD20+ B cells and/or a CD20+ phenotype can refer to cells found to express CD20, e.g., based on binding of cells with a labelled anti-CD20 antibody, e.g., as set forth in Example 10 and/or FIG. 14. In various embodiments, labeling can be determined by any of a variety of methods known in the art, including without limitation by relative presence of a label, such as a fluorescence of a fluorescence label. In various embodiments, labeling can be measured by techniques including methods such as fluorescence-activated cell sorting (FACS). Accordingly, in various embodiments, monocytes can refer to a population of cells that are CD11+/CD14+ cells and/or determined to have a CD11+/CD14+ phenotype. In various embodiments, T cells can refer to a population of cells that are CD3+ cells and/or determined to have a CD3+ phenotype. In various embodiments, NK cells can refer to a population of cells that are CD3−/CD56+ cells and/or determined to have a CD3−/CD56+ phenotype. In various embodiments, B cells can refer to a population of cells that are CD20+ cells and/or determined to have a CD20+ phenotype.

[0332] In various embodiments, vectors and genomes of the present disclosure that can infect and/or transduce, and/or selectively target, CD11+/CD14+ monocytes are vectors and genomes of Ad1, Ad16, Ad34, and/or Ad35 serotype. In various embodiments, vectors and genomes of the present disclosure that can infect and/or transduce, and/or selectively target, CD3+ T cells are vectors and genomes of Ad5, Ad16, Ad34, and/or Ad35 serotype. In various embodiments, vectors and genomes of the present disclosure that can infect and/or transduce, and/or selectively target, CD3−/CD56+NK cells are vectors and genomes of Ad11, Ad16, Ad34, and/or Ad35 serotype. In various embodiments, vectors and genomes of the present disclosure that can infect and/or transduce, and/or selectively target, CD20+ B cells are vectors and genomes of Ad16 serotype.

[0333] In various embodiments, vectors and genomes of the present disclosure that can infect and/or transduce, and/or selectively target, CD11+/CD14+ monocytes are vectors and genomes of Ad11, Ad34, and/or Ad35 serotype. In various embodiments, vectors and genomes of the present disclosure that can infect and/or transduce, and/or selectively target, CD3+ T cells are vectors and genomes of Ad34 and/or Ad35 serotype. In various embodiments, vectors and genomes of the present disclosure that can infect and/or transduce, and/or selectively target, CD3−/CD56+NK cells are vectors and genomes of Ad11, Ad34, and/or Ad35 serotype.

[0334] In various embodiments, vectors and genomes of the present disclosure can infect and/or transduce, and/or selectively target, monocytes, T cells, NK cells, and/or B cells. In various embodiments, vectors and genomes of the present disclosure that can infect and/or transduce, and/or selectively target, monocytes are vectors and genomes of Ad11, Ad16, Ad34, and/or Ad35 serotype. In various embodiments, vectors and genomes of the present disclosure that can infect and/or transduce, and/or selectively target, T cells are vectors and genomes of Ad5, Ad16, Ad34, and/or Ad35 serotype. In various embodiments, vectors and genomes of the present disclosure that can infect and/or transduce, and/or selectively target, NK cells are vectors and genomes of Ad11, Ad16, Ad34, and/or Ad35 serotype. In various embodiments, vectors and genomes of the present disclosure that can infect and/or transduce, and/or selectively target, B cells are vectors and genomes of Ad16 serotype.

[0335] In various embodiments, vectors and genomes of the present disclosure can infect and/or transduce, and/or selectively target, monocytes, T cells, and/or NK cells. In various embodiments, vectors and genomes of the present disclosure that can infect and/or transduce, and/or selectively target, monocytes are vectors and genomes of Ad11, Ad34, and/or Ad35 serotype. In various embodiments, vectors and genomes of the present disclosure that can infect and/or transduce, and/or selectively target, T cells are vectors and genomes of Ad34 and/or Ad35 serotype. In various embodiments, vectors and genomes of the present disclosure that can infect and/or transduce, and/or selectively target, NK cells are vectors and genomes of Ad11, Ad34, and/or Ad35 serotype.

[0336] In various embodiments, vectors and genomes of the present disclosure that can infect and/or transduce, and/or selectively target, CD11+/CD14+ monocytes are vectors and genomes of Ad5, Ad7, Ad11, Ad16, Ad34, and/or Ad35 serotype. In various embodiments, vectors and genomes of the present disclosure that can infect and/or transduce, and/or selectively target, CD3+ T cells are vectors and genomes of Ad5, Ad7, Ad1, Ad16, Ad34, and/or Ad35 serotype. In various embodiments, vectors and genomes of the present disclosure that can infect and/or transduce, and/or selectively target, CD3−/CD56+NK cells are vectors and genomes of Ad5, Ad7, Ad1, Ad16, Ad34, and/or Ad35 serotype. In various embodiments, vectors and genomes of the present disclosure that can infect and/or transduce, and/or selectively target, CD20+ B cells are vectors and genomes of Ad5, Ad7, Ad1, Ad16, Ad34, and/or Ad35 serotype.

[0337] In various embodiments, vectors and genomes of the present disclosure that can infect and/or transduce, and/or selectively target, monocytes are vectors and genomes of Ad5, Ad7, Ad11, Ad16, Ad34, and/or Ad35 serotype. In various embodiments, vectors and genomes of the present disclosure that can infect and/or transduce, and/or selectively target, T cells are vectors and genomes of Ad5, Ad7, Ad1, Ad16, Ad34, and/or Ad35 serotype. In various embodiments, vectors and genomes of the present disclosure that can infect and/or transduce, and/or selectively target, NK cells are vectors and genomes of Ad5, Ad7, Ad11, Ad16, Ad34, and/or Ad35 serotype. In various embodiments, vectors and genomes of the present disclosure that can infect and/or transduce, and/or selectively target, B cells are vectors and genomes of Ad5, Ad7, Ad1, Ad16, Ad34, and/or Ad35 serotype.

### III. Dosages, Formulations, and Administration

[0338] A vector can be formulated such that it is pharmaceutically acceptable for administration to cells or animals, e.g., to humans. A vector may be administered in vitro, ex vivo, or in vivo. The adenoviral vectors described herein can be formulated for administration to a subject. Formulations include an adenoviral vector encoding a therapeutic agent and one or more pharmaceutically acceptable carriers.

[0339] As disclosed herein, a vector can be in any form known in the art. Such forms include, e.g., liquid, semi-solid and solid dosage forms, such as liquid solutions (e.g., injectable and infusible solutions), dispersions or suspensions, tablets, pills, powders, liposomes and suppositories.

[0340] Selection or use of any particular form may depend, in part, on the intended mode of administration and therapeutic application. For example, compositions containing a composition intended for systemic or local delivery can be in the form of injectable or infusible solutions. Accordingly, a vector can be formulated for administration by a parenteral mode (e.g., intravenous, subcutaneous, intraperitoneal, or intramuscular injection). As used herein, parenteral administration refers to modes of administration other than enteral and topical administration, usually by injection, and include, without limitation, intravenous, intranasal, intraocular, pulmonary, intramuscular, intraarterial, intrathecal, intracapsular, intraorbital, intracardiac, intradermal, intrapulmonary, intraperitoneal, transtracheal, subcutaneous, subcuticular, intraarticular, subcapsular, subarachnoid, intraspinal, epidural, intracerebral, intracranial, intracarotid and intracisternal injection and infusion. A parenteral route of administration can be, for example, administration by injection, transnasal administration, transpulmonary administration, or transcutaneous administration. Administration can be systemic or local by intravenous injection, intramuscular injection, intraperitoneal injection, subcutaneous injection.

[0341] In various embodiments, a vector of the present invention can be formulated as a solution, microemulsion, dispersion, liposome, or other ordered structure suitable for stable storage at high concentration. Sterile injectable solutions can be prepared by incorporating a composition described herein in the required amount in an appropriate solvent with one or a combination of ingredients enumerated above, as required, followed by filter sterilization. Generally, dispersions are prepared by incorporating a composition described herein into a sterile vehicle that contains a basic dispersion medium and the required other ingredients from those enumerated above. In the case of sterile powders for the preparation of sterile injectable solutions, methods for preparation include vacuum drying and freeze-drying that yield a powder of a composition described herein plus any additional desired ingredient (see below) from a previously sterile-filtered solution thereof. The proper fluidity of a solution can be maintained, for example, by the use of a coating such as lecithin, by the maintenance of the required particle size in the case of dispersion and by the use of surfactants. Prolonged absorption of injectable compositions can be brought about by including in the composition a reagent that delays absorption, for example, monostearate salts, and gelatin.

[0342] A vector can be administered parenterally in the form of an injectable formulation including a sterile solution or suspension in water or another pharmaceutically acceptable liquid. For example, the vector can be formulated by suitably combining the therapeutic molecule with pharmaceutically acceptable vehicles or media, such as sterile water and physiological saline, vegetable oil, emulsifier, suspension agent, surfactant, stabilizer, flavoring excipient, diluent, vehicle, preservative, binder, followed by mixing in a unit dose form required for generally accepted pharmaceutical practices. The amount of vector included in the pharmaceutical preparations is such that a suitable dose within the designated range is provided. Nonlimiting examples of oily liquid include sesame oil and soybean oil, and it may be combined with benzyl benzoate or benzyl alcohol as a solubilizing agent. Other items that may be included are a buffer such as a phosphate buffer, or sodium acetate buffer, a soothing agent such as procaine hydrochloride, a stabilizer such as benzyl alcohol or phenol, and an antioxidant. The formulated injection can be packaged in a suitable ampule.

[0343] In various embodiments, subcutaneous administration can be accomplished by means of a device, such as a syringe, a prefilled syringe, an auto-injector (e.g., disposable or reusable), a pen injector, a patch injector, a wearable injector, an ambulatory syringe infusion pump with subcutaneous infusion sets, or other device for subcutaneous injection.

[0344] In some embodiments, a vector described herein can be therapeutically delivered to a subject by way of local administration. As used herein, “local administration” or “local delivery,” can refer to delivery that does not rely upon transport of the vector or vector to its intended target tissue or site via the vascular system. For example, the vector may be delivered by injection or implantation of the composition or agent or by injection or implantation of a device containing the composition or agent. In certain embodiments, following local administration in the vicinity of a target tissue or site, the composition or agent, or one or more components thereof, may diffuse to an intended target tissue or site that is not the site of administration.

[0345] In some embodiments, compositions provided herein are present in unit dosage form, which unit dosage form can be suitable for self-administration. Such a unit dosage form may be provided within a container, typically, for example, a vial, cartridge, prefilled syringe or disposable pen. A doser such as the doser device described in U.S. Pat. No. 6,302,855, may also be used, for example, with an injection system as described herein.

[0346] Pharmaceutical forms of vector formulations suitable for injection can include sterile aqueous solutions or dispersions. A formulation can be sterile and must be fluid to allow proper flow in and out of a syringe. A formulation can also be stable under the conditions of manufacture and storage. A carrier can be a solvent or dispersion medium containing, for example, water and saline or buffered aqueous solutions. Preferably, isotonic agents, for example, sugars or sodium chloride can be used in the formulations.

[0347] A suitable dose of a vector described herein can depend on a variety of factors including, e.g., the age, sex, and weight of a subject to be treated, the condition or disease to be treated, and the particular vector used. Other factors affecting the dose administered to the subject include, e.g., the type or severity of the condition or disease. Other factors can include, e.g., other medical disorders concurrently or previously affecting the subject, the general health of the subject, the genetic disposition of the subject, diet, time of administration, rate of excretion, drug combination, and any other additional therapeutics that are administered to the subject. A suitable means of administration of a vector can be selected based on the condition or disease to be treated and upon the age and condition of a subject. Dose and method of administration can vary depending on the weight, age, condition, and the like of a patient, and can be suitably selected as needed by those skilled in the art. A specific dosage and treatment regimen for any particular subject can be adjusted based on the judgment of a medical practitioner.

[0348] In various instances, a vector can be formulated to include a pharmaceutically acceptable carrier or excipient. Examples of pharmaceutically acceptable carriers include, without limitation, any and all solvents, dispersion media, coatings, antibacterial and antifungal agents, isotonic and absorption delaying agents, and the like that are physiologically compatible. Compositions of the present invention can include a pharmaceutically acceptable salt, e.g., an acid addition salt or a base addition salt.

[0349] Exemplary generally used pharmaceutically acceptable carriers include any and all absorption delaying agents, antioxidants, binders, buffering agents, bulking agents or fillers, chelating agents, coatings, disintegration agents, dispersion media, gels, isotonic agents, lubricants, preservatives, salts, solvents or co-solvents, stabilizers, surfactants, and/or delivery vehicles.

[0350] In various embodiments, a composition including a vector as described herein, e.g., a sterile formulation for injection, can be formulated in accordance with conventional pharmaceutical practices using distilled water for injection as a vehicle. For example, physiological saline or an isotonic solution containing glucose and other supplements such as D-sorbitol, D-mannose, D-mannitol, and sodium chloride may be used as an aqueous solution for injection, optionally in combination with a suitable solubilizing agent, for example, alcohol such as ethanol and polyalcohol such as propylene glycol or polyethylene glycol, and a nonionic surfactant such as polysorbate 80™, HCO-50 and the like.

[0351] The formulations disclosed herein can be formulated for administration by, for example, injection. For injection, formulation can be formulated as aqueous solutions, such as in buffers including Hanks' solution, Ringer's solution, or physiological saline, or in culture media, such as Iscove's Modified Dulbecco's Medium (IMDM). The aqueous solutions can include formulatory agents such as suspending, stabilizing, and/or dispersing agents. Alternatively, the formulation can be in lyophilized and/or powder form for constitution with a suitable vehicle, e.g., sterile pyrogen-free water, before use.

[0352] Any formulation disclosed herein can advantageously include any other pharmaceutically acceptable carriers which include those that do not produce significantly adverse, allergic, or other untoward reactions that outweigh the benefit of administration. Exemplary pharmaceutically acceptable carriers and formulations are disclosed in Remington's Pharmaceutical Sciences, 18th Ed. Mack Printing Company, 1990. Moreover, formulations can be prepared to meet sterility, pyrogenicity, general safety, and purity standards as required by US FDA Office of Biological Standards and/or other relevant foreign regulatory agencies.

[0353] Therapeutically effective amounts of adenoviral vector associated with a therapeutic gene can include doses ranging from, for example, 1×10⁷ to 50×10⁸ infection units (IU) or from 5×10⁷ to 20×10⁸ IU. In other examples, a dose can include 5×10⁷ IU, 6×10⁷ IU, 7×10⁷ IU, 8×10⁷ IU, 9×10⁷ IU, 1×10⁸ IU, 2×10⁸ IU, 3×10⁸ IU, 4×10⁸ IU, 5×10⁸ IU, 6×10⁸ IU, 7×10⁸ IU, 8×10⁸ IU, 9×10⁸ IU, 10×10⁸ IU, or more. In particular embodiments, a therapeutically effective amount of an adenoviral vector associated with a therapeutic gene includes 4×10⁸ IU. In particular embodiments, a therapeutically effective amount of an adenoviral vector associated with a therapeutic gene can be administered subcutaneously or intravenously. In particular embodiments, a therapeutically effective amount of an adenoviral vector associated with a therapeutic gene can be administered following administration with one or more mobilization factors.

[0354] In various embodiments of the present disclosure, an in vivo gene therapy includes administration of at least one viral gene therapy vector to a subject in combination with at least one immune suppression regimen. In an in vivo gene therapy including more than one vector species, such as a first vector that is a supported viral gene therapy vector in combination with a second vector that is a support vector, the first vector and the second vector can be administered in a single formulation or dosage form or in two separate formulations or dosage forms. In various embodiments, the first and second vectors can be administered at the same time or at different times, e.g., during the same one-hour period or during non-overlapping one-hour periods. In various embodiments, the first and second vectors can be administered at the same time or at different times, e.g., on the same day or on different days. In various embodiments, the first and second vectors can be administered at the same dosage or at different dosages, e.g., where the dosage is measured as the total number of viral particles or as a number of viral particles per kilogram of the subject. In various embodiments, the first and second vectors can be administered in a pre-defined ratio. In various embodiments, the ratio is in the range of 2:1 to 1:2, e.g., 1:1.

[0355] In various embodiments, a vector is administered to a subject in a single total dose on a single day. In various embodiments, a vector is administered in two, three, four, or more unit doses that together constitute a total dose. In various embodiments, one unit dose of a vector is administered to a subject per day on each of one, two, three, four, or more consecutive days. In various embodiments, two unit doses of a vector are administered to a subject per day on each of one, two, three, four, or more consecutive days. Accordingly, in various embodiments, a daily dose can refer to the dose of vector received by a subject over the course of a day. In various embodiments, the term day refers to a twenty-four-hour period, such as a twenty-four-hour period from midnight of a first calendar date to midnight of the next calendar date.

[0356] In various embodiments, a unit dose, daily dose, or total dose of a vector, such as a viral gene therapy vector or support vector, or the total combined dose of a viral gene therapy vector and a support vector, can be at least 1E8, 5E8, 1E9, 5E9, 1E10, 5E10, 1E11, 5E11, 1E12, 5E12, 1E13, 5E13, 1E14, or 1E15 viral particles per kilogram (vp/kg). In various embodiments, a unit dose, daily dose, or total dose of a vector, such as a viral gene therapy vector or support vector, or the total combined dose of a viral gene therapy vector and a support vector, can fall within a range having a lower bound selected from 1E8, 5E8, 1E9, 5E9, 1E10, 5E10, 1E11, 5E11, 1E12, 5E12, 1E13, 5E13, 1E14, or 1E15 vp/kg and an upper bound selected from 1E8, 5E8, 1E9, 5E9, 1E10, 5E10, 1E11, 5E11, 1E12, 5E12, 1E13, 5E13, 1E14, or 1E15 vp/kg.

[0357] In various embodiments, a viral gene therapy vector is administered at a unit dose, daily dose, or total dose of at least 1E10, 5E10, 1E11, 5E11, 1E12, 5E12, 1E13, 5E13, 1E14, or 1E15 vp/kg and a support vector is administered at a unit dose, daily dose, or total dose of at least 1E8, 5E8, 1E9, 5E9, 1E10, 5E10, 1E11, and 5E11 vp/kg, optionally where the unit dose, daily dose, or total dose of the viral gene therapy vector is within a range having a lower bound selected from 1E10, 5E10, 1E11, 5E11, 1E12, and 5E12, vp/kg and an upper bound selected from 1E11, 5E11, 1E12, 5E12, 1E13, 5E13, 1E14, and 1E15 vp/kg, and/or where the unit dose, daily dose, or total dose of the support vector is within a range having a lower bound selected from 1E8, 5E8, 1E9, 5E9, 1E10, and 5E10 vp/kg and an upper bound selected from 1E9, 5E9, 1E10, 5E10, 1E11, and 5E11 vp/kg.

[0358] In various embodiments, a support vector is administered at a unit dose, daily dose, or total dose of at least 1E10, 5E10, 1E11, 5E11, 1E12, 5E12, 1E13, 5E13, 1E14, or 1E15 vp/kg and a supported viral gene therapy vector is administered at a unit dose, daily dose, or total dose of at least 1E8, 5E8, 1E9, 5E9, 1E10, 5E10, 1E11, and 5E11 vp/kg, optionally where the unit dose, daily dose, or total dose of the support vector is within a range having a lower bound selected from 1E10, 5E10, 1E11, 5E11, 1E12, and 5E12, vp/kg and an upper bound selected from 1E11, 5E11, 1E12, 5E12, 1E13, 5E13, 1E14, and 1E15 vp/kg, and/or where the unit dose, daily dose, or total dose of the supported viral gene therapy vector is within a range having a lower bound selected from 1E8, 5E8, 1E9, 5E9, 1E10, and 5E10 vp/kg and an upper bound selected from 1E9, 5E9, 1E10, 5E10, 1E11, and 5E11 vp/kg. In various embodiments, a supported viral gene therapy vector and a support vector are administered in a pre-defined ratio. In various embodiments, the ratio is in the range of 2:1 to 1:2, e.g., 1:1.

### IV. Applications

[0359] Methods and compositions provided herein are disclosed at least in part for use in in vivo gene therapy. However, for the avoidance of doubt, the present disclosure expressly includes the use of compositions and methods provided herein for ex vivo engineering of cells and/or tissues, as well as in vitro uses including the engineering of cells and/or tissues for research purposes. Gene therapy includes use of a vector, genome, or system of the present disclosure in a method of introducing exogenous DNA into a host cell (such as a target cell) and/or a nucleic acid (such as a target nucleic acid, such as a target genome, e.g., the genome of a target cell), which introducing of exogenous DNA can be referred to as genetic modification of the host cell or nucleic acid. Gene therapy can therefore be referred to herein, e.g., as a method of genetically modifying a host cell or nucleic acid. The present disclosure includes description and exemplification of compositions and methods relating to in vivo, in vitro, and ex vivo therapy and those of skill in the art will appreciate that various methods and compositions provided herein are generally applicable to introduction of a nucleic acid payload into a subject, e.g., a host or target cell. Because such compositions and methods are of general utility, e.g., in gene therapy, they are useful both as tools in gene therapy in general and in various particular conditions, including those provided herein.

### IV(a). In Vivo Gene Therapy

[0360] Treatments using in vivo gene therapy, which includes the direct delivery of a viral vector to a patient, have been explored. In vivo gene therapy is an attractive approach because it may not require any genotoxic conditioning (or could require less genotoxic conditioning) nor ex vivo cell processing and thus could be adopted at many institutions worldwide, including those in developing countries, as the therapy could be administered through an injection, similar to what is already done worldwide for the delivery of vaccines. In various embodiments, methods of in vivo gene therapy with adenoviral vectors of the present disclosure can include one or more steps of (i) target cell mobilization, (ii) immunosuppression, (iii) administration of a vector, genome, system or formulation provided herein, and/or (iv) selection of transduced cells and/or cells that have integrated an integration element of a payload of an adenoviral vector or genome.

[0361] In various embodiments, methods and compositions disclosed herein can be used for treating subjects (humans, veterinary animals (dogs, cats, reptiles, birds, etc.), livestock (horses, cattle, goats, pigs, chickens, etc.), and research animals (monkeys, rats, mice, fish, etc.). Treating subjects includes delivering therapeutically effective amounts of one or more vectors, genomes, or systems of the present disclosure. Therapeutically effective amounts include those that provide effective amounts, prophylactic treatments, and/or therapeutic treatments.

[0362] Vectors disclosed herein can be administered in coordination with mobilization factors. In certain embodiments, adenoviral vector compositions described herein can be administered in concert with HSPC mobilization. In particular embodiments, administration of adenoviral donor vector occurs concurrently with administration of one or more mobilization factors. In particular embodiments, administration of adenoviral donor vector follows administration of one or more mobilization factors. In particular embodiments, administration of adenoviral donor vector follows administration of a first one or more mobilization factors and occurs concurrently with administration of a second one or more mobilization factors. Agents for HSPC mobilization include, for example, granulocyte-colony stimulating factor (G-CSF), granulocyte macrophage colony stimulating factor (GM-CSF), AMD3100, SCF, S-CSF, a CXCR4 antagonist, a CXCR2 agonist, and Gro-Beta (GRO-β). In various embodiments, a CXCR4 antagonist is AMD3100 and/or a CXCR2 agonist is GRO-β.

[0363] G-CSF is a cytokine whose functions in HSPC mobilization can include the promotion of granulocyte expansion and both protease-dependent and independent attenuation of adhesion molecules and disruption of the SDF-1/CXCR4 axis. In particular embodiments, any commercially available form of G-CSF known to one of ordinary skill in the art can be used in the methods and compositions as disclosed herein, for example, Filgrastim (Neupogen®, Amgen Inc., Thousand Oaks, CA) and PEGylated Filgrastim (Pegfilgrastim, NEULASTA®, Amgen Inc., Thousand Oaks, CA).

[0364] GM-CSF is a monomeric glycoprotein also known as colony-stimulating factor 2 (CSF2) that functions as a cytokine and is naturally secreted by macrophages, T cells, mast cells, natural killer cells, endothelial cells, and fibroblasts. In particular embodiments, any commercially available form of GM-CSF known to one of ordinary skill in the art can be used in the methods and compositions as disclosed herein, for example, Sargramostim (Leukine, Bayer Healthcare Pharmaceuticals, Seattle, WA) and molgramostim (Schering-Plough, Kenilworth, NJ).

[0365] AMD3100 (MOZOBIL™, PLERIXAFOR™; Sanofi-Aventis, Paris, France), a synthetic organic molecule of the bicyclam class, is a chemokine receptor antagonist and reversibly inhibits SDF-1 binding to CXCR4, promoting HSPC mobilization. AMD3100 is approved to be used in combination with G-CSF for HSPC mobilization in patients with myeloma and lymphoma.

[0366] SCF, also known as KIT ligand, KL, or steel factor, is a cytokine that binds to the c-kit receptor (CD117). SCF can exist both as a transmembrane protein and a soluble protein. This cytokine plays an important role in hematopoiesis, spermatogenesis, and melanogenesis. In particular embodiments, any commercially available form of SCF known to one of ordinary skill in the art can be used in the methods and compositions as disclosed herein, for example, recombinant human SCF (Ancestim, STEMGEN®, Amgen Inc., Thousand Oaks, CA).

[0367] Chemotherapy used in intensive myelosuppressive treatments also mobilizes HSPCs to the peripheral blood as a result of compensatory neutrophil production following chemotherapy-induced aplasia. In particular embodiments, chemotherapeutic agents that can be used for mobilization of HSPCs include cyclophosphamide, etoposide, ifosfamide, cisplatin, and cytarabine.

[0368] Additional agents that can be used for cell mobilization include: CXCL12/CXCR4 modulators (e.g., CXCR4 antagonists: POL6326 (Polyphor, Allschwil, Switzerland), a synthetic cyclic peptide which reversibly inhibits CXCR4; BKT-140 (4F-benzoyl-TN14003; Biokine Therapeutics, Rehovit, Israel); TG-0054 (Taigen Biotechnology, Taipei, Taiwan); CXCL12 neutralizer NOX-A12 (NOXXON Pharma, Berlin, Germany) which binds to SDF-1, inhibiting its binding to CXCR4); Sphingosine-1-phosphate (S1P) agonists (e.g., SEW2871, Juarez et al. Blood 119: 707-716, 2012); vascular cell adhesion molecule-1 (VCAM) or very late antigen 4 (VLA-4) inhibitors (e.g., Natalizumab, a recombinant humanized monoclonal antibody against α4 subunit of VLA-4 (Zohren et al. Blood 111: 3893-3895, 2008); BIO5192, a small molecule inhibitor of VLA-4 (Ramirez et al. Blood 114: 1340-1343, 2009)); parathyroid hormone (Brunner et al. Exp Hematol. 36: 1157-1166, 2008); proteasome inhibitors (e.g., Bortezomib, Ghobadi et al. ASH Annual Meeting Abstracts. p. 583, 2012); Groβ, a member of CXC chemokine family which stimulates chemotaxis and activation of neutrophils by binding to the CXCR2 receptor (e.g., SB-251353, King et al. Blood 97: 1534-1542, 2001); stabilization of hypoxia inducible factor (HIF) (e.g., FG-4497, Forristal et al. ASH Annual Meeting Abstracts. p. 216, 2012); Firategrast, an α4β1 and α4=β7 integrin inhibitor (α4β1/7) (Kim et al. Blood 128: 2457-2461, 2016); Vedolizumab, a humanized monoclonal antibody against the α4β7 integrin (Rosario et al. Clin Drug Investig 36: 913-923, 2016); and BOP (N-(benzenesulfonyl)-L-prolyl-L-O-(1-pyrrolidinylcarbonyl) tyrosine) which targets integrins α9β1/α4β1 (Cao et al. Nat Commun 7: 11007, 2016). Additional agents that can be used for HSPC mobilization are described in, for example, Richter R et al. Transfus Med Hemother 44:151-164, 2017, Bendall & Bradstock, Cytokine & Growth Factor Reviews 25: 355-367, 2014, WO 2003043651, WO 2005017160, WO 2011069336, U.S. Pat. Nos. 5,637,323, 7,288,521, 9,782,429, US 2002/0142462, and US 2010/02268.

[0369] In particular embodiments, a therapeutically effective amount of G-CSF includes 0.1 μg/kg to 100 μg/kg. In particular embodiments, a therapeutically effective amount of G-CSF includes 0.5 μg/kg to 50 μg/kg. In particular embodiments, a therapeutically effective amount of G-CSF includes 0.5 μg/kg, 1 μg/kg, 2 μg/kg, 3 μg/kg, 4 μg/kg, 5 μg/kg, 6 μg/kg, 7 μg/kg, 8 μg/kg, 9 μg/kg, 10 μg/kg, 11 μg/kg, 12 μg/kg, 13 μg/kg, 14 μg/kg, 15 μg/kg, 16 μg/kg, 17 μg/kg, 18 μg/kg, 19 μg/kg, 20 μg/kg, or more. In particular embodiments, a therapeutically effective amount of G-CSF includes 5 μg/kg. In particular embodiments, G-CSF can be administered subcutaneously or intravenously. In particular embodiments, G-CSF can be administered for 1 day, 2 consecutive days, 3 consecutive days, 4 consecutive days, 5 consecutive days, or more. In particular embodiments, G-CSF can be administered for 4 consecutive days. In particular embodiments, G-CSF can be administered for 5 consecutive days. In particular embodiments, as a single agent, G-CSF can be used at a dose of 10 μg/kg subcutaneously daily, initiated 3, 4, 5, 6, 7, or 8 days before adenoviral delivery. In particular embodiments, G-CSF can be administered as a single agent followed by concurrent administration with another mobilization factor. In particular embodiments, G-CSF can be administered as a single agent followed by concurrent administration with AMD3100. In particular embodiments, a treatment protocol includes a 5 day treatment where G-CSF can be administered on day 1, day 2, day 3, and day 4 and on day 5, G-CSF and AMD3100 are administered 6 to 8 hours prior to adenoviral administration.

[0370] Therapeutically effective amounts of GM-CSF to administer can include doses ranging from, for example, 0.1 to 50 μg/kg or from 0.5 to 30 μg/kg. In particular embodiments, a dose at which GM-CSF can be administered includes 0.5 μg/kg, 1 μg/kg, 2 μg/kg, 3 μg/kg, 4 μg/kg, 5 μg/kg, 6 μg/kg, 7 μg/kg, 8 μg/kg, 9 μg/kg, 10 μg/kg, 11 μg/kg, 12 μg/kg, 13 μg/kg, 14 μg/kg, 15 μg/kg, 16 μg/kg, 17 μg/kg, 18 μg/kg, 19 μg/kg, 20 μg/kg, or more. In particular embodiments, GM-CSF can be administered subcutaneously for 1 day, 2 consecutive days, 3 consecutive days, 4 consecutive days, 5 consecutive days, or more. In particular embodiments, GM-CSF can be administered subcutaneously or intravenously. In particular embodiments, GM-CSF can be administered at a dose of 10 μg/kg subcutaneously daily initiated 3, 4, 5, 6, 7, or 8 days before adenoviral delivery. In particular embodiments, GM-CSF can be administered as a single agent followed by concurrent administration with another mobilization factor. In particular embodiments, GM-CSF can be administered as a single agent followed by concurrent administration with AMD3100. In particular embodiments, a treatment protocol includes a 5 day treatment where GM-CSF can be administered on day 1, day 2, day 3, and day 4 and on day 5, GM-CSF and AMD3100 are administered 6 to 8 hours prior to adenoviral administration. A dosing regimen for Sargramostim can include 200 μg/m², 210 μg/m², 220 μg/m², 230 μg/m², 240 μg/m², 250 μg/m², 260 μg/m², 270 μg/m², 280 μg/m², 290 μg/m², 300 μg/m², or more. In particular embodiments, Sargramostim can be administered for 1 day, 2 consecutive days, 3 consecutive days, 4 consecutive days, 5 consecutive days, or more. In particular embodiments, Sargramostim can be administered subcutaneously or intravenously. In particular embodiments, a dosing regimen for Sargramostim can include 250 μg/m²/day intravenous or subcutaneous and can be continued until a targeted cell amount is reached in the peripheral blood or can be continued for 5 days. In particular embodiments, Sargramostim can be administered as a single agent followed by concurrent administration with another mobilization factor. In particular embodiments, Sargramostim can be administered as a single agent followed by concurrent administration with AMD3100. In particular embodiments, a treatment protocol includes a 5 day treatment where Sargramostim can be administered on day 1, day 2, day 3, and day 4 and on day 5, Sargramostim and AMD3100 are administered 6 to 8 hours prior to adenoviral administration.

[0371] In particular embodiments, a therapeutically effective amount of AMD3100 includes 0.1 mg/kg to 100 mg/kg. In particular embodiments, a therapeutically effective amount of AMD3100 includes 0.5 mg/kg to 50 mg/kg. In particular embodiments, a therapeutically effective amount of AMD3100 includes 0.5 mg/kg, 1 mg/kg, 2 mg/kg, 3 mg/kg, 4 mg/kg, 5 mg/kg, 6 mg/kg, 7 mg/kg, 8 mg/kg, 9 mg/kg, 10 mg/kg, 11 mg/kg, 12 mg/kg, 13 mg/kg, 14 mg/kg, 15 mg/kg, 16 mg/kg, 17 mg/kg, 18 mg/kg, 19 mg/kg, 20 mg/kg, or more. In particular embodiments, a therapeutically effective amount of AMD3100 includes 4 mg/kg. In particular embodiments, a therapeutically effective amount of AMD3100 includes 5 mg/kg. In particular embodiments, a therapeutically effective amount of AMD3100 includes 10 μg/kg to 500 μg/kg or from 50 μg/kg to 400 μg/kg. In particular embodiments, a therapeutically effective amount of AMD3100 includes 100 μg/kg, 150 μg/kg, 200 μg/kg, 250 μg/kg, 300 μg/kg, 350 μg/kg, or more. In particular embodiments, AMD3100 can be administered subcutaneously or intravenously. In particular embodiments, AMD3100 can be administered subcutaneously at 160-240 μg/kg 6 to 11 hours prior to adenoviral delivery. In particular embodiments, a therapeutically effective amount of AMD3100 can be administered concurrently with administration of another mobilization factor. In particular embodiments, a therapeutically effective amount of AMD3100 can be administered following administration of another mobilization factor. In particular embodiments, a therapeutically effective amount of AMD3100 can be administered following administration of G-CSF. In particular embodiments, a treatment protocol includes a 5-day treatment where G-CSF is administered on day 1, day 2, day 3, and day 4 and on day 5, G-CSF and AMD3100 are administered 6 to 8 hours prior to adenoviral injection.

[0372] Therapeutically effective amounts of SCF to administer can include doses ranging from, for example, 0.1 to 100 μg/kg/day or from 0.5 to 50 μg/kg/day. In particular embodiments, a dose at which SCF can be administered includes 0.5 μg/kg/day, 1 μg/kg/day, 2 μg/kg/day, 3 μg/kg/day, 4 μg/kg/day, 5 μg/kg/day, 6 μg/kg/day, 7 μg/kg/day, 8 μg/kg/day, 9 μg/kg/day, 10 μg/kg/day, 11 μg/kg/day, 12 μg/kg/day, 13 μg/kg/day, 14 μg/kg/day, 15 μg/kg/day, 16 μg/kg/day, 17 μg/kg/day, 18 μg/kg/day, 19 μg/kg/day, 20 μg/kg/day, 21 μg/kg/day, 22 μg/kg/day, 23 μg/kg/day, 24 μg/kg/day, 25 μg/kg/day, 26 μg/kg/day, 27 μg/kg/day, 28 μg/kg/day, 29 μg/kg/day, 30 μg/kg/day, or more. In particular embodiments, SCF can be administered for 1 day, 2 consecutive days, 3 consecutive days, 4 consecutive days, 5 consecutive days, or more. In particular embodiments, SCF can be administered subcutaneously or intravenously. In particular embodiments, SCF can be injected subcutaneously at 20 μg/kg/day. In particular embodiments, SCF can be administered as a single agent followed by concurrent administration with another mobilization factor. In particular embodiments, SCF can be administered as a single agent followed by concurrent administration with AMD3100. In particular embodiments, a treatment protocol includes a 5 day treatment where SCF can be administered on day 1, day 2, day 3, and day 4 and on day 5, SCF and AMD3100 are administered 6 to 8 hours prior to adenoviral administration.

[0373] In particular embodiments, growth factors GM-CSF and G-CSF can be administered to mobilize HSPC in the bone marrow niches to the peripheral circulating blood to increase the fraction of HSPCs circulating in the blood. In particular embodiments, mobilization can be achieved with administration of G-CSF/Filgrastim (Amgen) and/or AMD3100 (Sigma). In particular embodiments, mobilization can be achieved with administration of GM-CSF/Sargramostim (Amgen) and/or AMD3100 (Sigma). In particular embodiments, mobilization can be achieved with administration of SCF/Ancestim (Amgen) and/or AMD3100 (Sigma). In particular embodiments, administration of G-CSF/Filgrastim precedes administration of AMD3100. In particular embodiments, administration of G-CSF/Filgrastim occurs concurrently with administration of AMD3100. In particular embodiments, administration of G-CSF/Filgrastim precedes administration of AMD3100, followed by concurrent administration of G-CSF/Filgrastim and AMD3100. US 20140193376 describes mobilization protocols utilizing a CXCR4 antagonist with a S1P receptor 1 (S1PR1) modulator agent. US 20110044997 describes mobilization protocols utilizing a CXCR4 antagonist with a vascular endothelial growth factor receptor (VEGFR) agonist.

[0374] Adenoviral vectors (e.g. Ad3, 5, 7, 11, 14, 16, 21, 34, 35, 37, or 50 vectors) are exemplary of vectors that can be administered in concert with HSPC mobilization. In particular embodiments, administration of an adenoviral vector occurs concurrently with administration of one or more mobilization factors. In particular embodiments, administration of an Adenoviral vector follows administration of one or more mobilization factors. In particular embodiments, administration of an Adenoviral vector follows administration of a first one or more mobilization factors and occurs concurrently with administration of a second one or more mobilization factors.

[0375] In particular embodiments, an HSC enriching agent, such as a CD19 immunotoxin or 5-FU can be administered to enrich for HSPCs. CD19 immunotoxin can be used to deplete all CD19 lineage cells, which accounts for 30% of bone marrow cells. Depletion encourages exit from the bone marrow. By forcing HSPCs to proliferate (whether via, e.g., CD19 immunotoxin of 5-FU), this stimulates their differentiation and exit from the bone marrow and increases transgene marking in peripheral blood cells.

[0376] Therapeutically effective amounts of HSC mobilization factors and/or HSC enriching agents can be administered through any appropriate administration route such as by, injection, infusion, perfusion, and more particularly by administration by one or more of bone marrow, intravenous, intradermal, intraarterial, intranodal, intralymphatic, intraperitoneal injection, infusion, or perfusion).

[0377] In particular embodiments, methods of the present disclosure can include selection for cells modified to express a selection marker (e.g., a mutant form of MGMT that is resistant to inactivation by 6-BG, but retains the ability to repair DNA damage). For example, particular embodiments include regimens that combine mobilization (e.g., a mobilization protocol described herein) with administration of an adenoviral vector described herein and administration BCNU or benzylguanine and temozolomide in the case of an adenoviral vector including a MGMT^{P140K} selection marker. In particular embodiments, the in vivo selection marker can include MGMT^{P140K} as described in Olszko et al., Gene Therapy 22: 591-595, 2015. Thus, selection for cells that express MGMT^{P140K} can select for transduced cells and/or contribute to therapeutic efficacy.

[0378] Adenoviral vectors can be administered concurrently with or following administration of one or more immunosuppression agents or immunosuppression regimens.

### IV(B). In Vitro and Ex Vivo Gene Therapy

[0379] In vitro gene therapy includes use of a vector, genome, or system of the present disclosure in a method of introducing exogenous DNA into a host cell (such as a target cell), system (e.g., a plurality of cells including one or more target and/or host cells), and/or a nucleic acid (such as a target nucleic acid, such as a target genome), where the host cell, system, or nucleic acid is not present in a multicellular organism (e.g., in a laboratory). In some embodiments, a target cell, system, or nucleic acid is derived (e.g., as a biological sample or portion thereof) from a multicellular organism, such as a mammal (e.g., a mouse, rat, human, or non-human primate). In various embodiments, a system can include a plurality of cell types, including for example a plurality of hematopoietic cell types. In vitro engineering of a cell derived from a multicellular organism can be referred to as ex vivo engineering, and can be used in ex vivo therapy. In various embodiments, methods and compositions of the present disclosure are utilized, e.g., as disclosed herein, to modify a target cell or nucleic acid derived from a first multicellular organism and the engineered target cell or nucleic acid is then administered to a second multicellular organism, such as a mammal (e.g., a mouse, rat, human, or non-human primate), e.g., in a method of adoptive cell therapy. In some instances, the first and second organisms are the same single subject organism. Return of in vitro engineered material to a subject from which the material was derived can be an autologous therapy. In some instances, the first and second organisms are different organisms (e.g., two organisms of the same species, e.g., two mice, two rats, two humans, or two non-human primates of the same species). Transfer of engineered material derived from a first subject to a second different subject can be an allogeneic therapy.

[0380] Ex vivo cell therapies can include isolation of hematopoietic cells (e.g., stem, progenitor or differentiated cells) from a donor (e.g., a mammalian donor, e.g., a human donor) such as a patient or a normal and/or healthy donor, expansion of isolated cells ex vivo—with or without genetic engineering—and administration of the cells to a subject to establish a transient or stable graft of the infused cells and/or their progeny. Such ex vivo approaches can be used, for example, to treat an inherited, infectious or neoplastic disease, to regenerate a tissue or to deliver a therapeutic agent to a disease site. In various ex vivo therapies there is no direct exposure of the subject to the gene transfer vector, and the target cells of transduction can be selected, expanded and/or differentiated, before or after any genetic engineering, to improve efficacy and safety.

[0381] Ex vivo therapies include hematopoietic cell transplantation. Autologous hematopoietic cell gene therapy represents a therapeutic option for several monogenic diseases of the blood and the immune system as well as for storage disorders, and it may become a first-line treatment option for selected disease conditions.

[0382] Applications of ex-vivo therapy include reconstituting dysfunctional cell lineages. For inherited diseases characterized by a defective or absent cell lineage, the lineage can be regenerated by functional progenitor cells, derived either from normal donors or from autologous cells that have been subjected to ex vivo gene transfer to correct the deficiency. An example is provided by SCIDs, in which a deficiency in any one of several genes blocks the development of mature lymphoid cells. Transplantation of non-manipulated normal donor hematopoietic cells, which can in various embodiments allow generation of donor-derived functional hematopoietic cells of various lineages in the host, represents a therapeutic option for SCIDs, as well as many other diseases that affect the blood and immune system. Autologous hematopoietic cell gene therapy, which can include engineering of a target hematopoietic cell population and, similarly to allogenic hematopoietic cell transplantation, can provide a steady supply of functional hematopoietic cells (e.g., progeny of engineered hematopoietic stem and/or progenitor cells), may have several advantages, including reduced risk of graft versus host disease (GvHD), reduced risk of graft rejection, and reduced need for post-transplant immunosuppression.

[0383] Applications of ex-vivo therapy include augmenting therapeutic gene dosage. In some applications, hematopoietic cell gene therapy may augment the therapeutic efficacy of allogenic hematopoietic cell transplantation. Therapeutic gene dosage can be engineered to supra-normal levels in transplanted cells.

[0384] Applications of ex-vivo therapy include introducing novel function and targeting gene therapy. Ex vivo gene therapy can confer a novel function to hematopoietic cells (e.g., one or more particular types of hematopoietic cells) or their progeny, such as establishing drug resistance to allow administration of a high-dose antitumor chemotherapy regime or establishing resistance to a pre-established infection with a virus, such as HIV, or other pathogen by expressing RNA-based agents (for example, ribozymes, RNA decoys, antisense RNA, RNA aptamers and small interfering RNA) and protein-based agents (for example, dominant-negative mutant viral proteins, fusion inhibitors and engineered nucleases that target the pathogen's genome).

### IV(C). Conditions Treatable by Gene Therapy

[0385] At least in part because adenoviral vectors of the present disclosure (e.g. Ad3, 5, 7, 11, 14, 16, 21, 34, 35, 37, or 50 vectors) can be used in vivo, in vitro, or ex vivo for modification of host and/or target cells, and further because an adenoviral vector can include payloads encoding a wide variety of expression products, it will be clear from the present specification that various technologies provided herein have broad applicability and can be used to treat a wide variety of conditions. Examples of conditions treatable by administration of an adenoviral vector, genome, or system of the present disclosure include, without limitation genetic conditions (e.g., hemoglobinopathies) and conditions treatable by expression of a therapeutic polypeptide (e.g., cancer).

[0386] In various embodiments, methods and compositions of the present disclosure can be used to treat a genetic condition (e.g., a condition arising from and/or caused by a mutation present in the genome of one or more cells of a subject). In various embodiments, methods and compositions of the present disclosure can be used to treat a genetic condition arising from and/or caused by a single point mutation present in the genome of one or more cells of a subject (e.g., a heterozygous or homozygous single point mutation). In various embodiments, methods and compositions of the present disclosure can be used to treat a protein deficiency. In various embodiments, methods and compositions of the present disclosure can be used to treat an enzyme deficiency. In various embodiments, methods and compositions of the present disclosure can be used to treat a blood condition (e.g., a condition characterized by a blood cell abnormality). Examples of genetic (e.g., point mutation) conditions, protein deficiencies, enzyme deficiencies, and/or blood conditions that can be treated by methods and compositions of the present disclosure include adenosine deaminase deficiency (ADA), adrenoleukodystrophy (ALD), agammaglobulinemia, alpha-1 antitrypsin deficiency, congenital amegakaryocytic thrombocytopenia, amyotrophic lateral sclerosis (Lou Gehrig's disease), ataxia telangiectasia, Batten disease, Bernard-Soulier Syndrome, CD40/CD40L deficiency, chronic granulomatous disease, common variable immune deficiency (CVID), congenital thrombotic thrombocytopenic purpura (cTTP), cystic fibrosis, Diamond Blackfan anemia (DBA), DOCK 8 deficiency, dyskeratosis congenital, Fabry disease, Factor V Deficiency, Factor VII Deficiency, Factor X Deficiency, Factor XI Deficiency, Factor XII Deficiency, Factor XIII Deficiency, familial apolipoprotein E deficiency and atherosclerosis (ApoE), familial erythrophagocytic lymphohistiocytosis, Fanconi anemia (FA), Friedreich ataxia, Gaucher disease, Glanzmann thrombasthenia, glucosemia, glycogen storage disease, glycogen storage disease type I (GSDI), Gray Platelet Syndrome, hemophilia, hemophilia A, hemophilia B, hereditary hemochromatosis, Hurler's syndrome, hyper IgM, Hypogammaglobulinemia, Krabbe disease, major histocompatibility complex class II deficiency (MHC-II), maple syrup urine disease, metachromatic leukodystrophy (MLD), mucopolysaccharidoses, mucopolysaccharidosis type I (MPS I), MPS II (Hunter Syndrome), MPS III (Sanfilippo syndrome), MPS IV (Morquio syndrome), MPS V, MPS VI (Maroteaux-Lamy syndrome), MPS VII (sly syndrome), muscular dystrophy, Niemann-Pick disease, Parkinson's disease, paroxysmal nocturnal hemoglobinuria (PNH), pernicious anemia, phenylketonuria (PKU), Pompe disease, pulmonary alveolar proteinosis (PAP), pure red cell aplasia (PRCA), pyruvate kinase deficiency, refractory anemia, Shwachman-Diamond syndrome, selective IgA deficiency, severe aplastic anemia, severe combined immunodeficiency disease (SCID), Severe combined immunodeficiency due to adenosine deaminase deficiency (ADA-SCID), sickle cell anemia, sickle cell disease, sickle cell trait, Tay Sachs, thalassemia, thalassemia intermedia, von Gierke disease, von Willebrand Disease, Wiskott-Aldrich syndrome (WAS), X-linked agammaglobulinemia (XLA), X-linked severe combined immunodeficiency (SCID-X1), Zellweger syndrome, α-mannosidosis, β-mannosidosis, and/or β-thalassemia, β-thalassemia major.

[0387] In various embodiments, methods and compositions of the present disclosure can be used to treat an inborn error of metabolism. In various embodiments, methods and compositions of the present disclosure can be used to treat a hyperproliferative condition

[0388] In various embodiments, methods and compositions of the present disclosure can be used to treat a cancer (e.g., a cancer characterized by abnormal blood cells). Examples of cancers that can be treated by methods and compositions of the present disclosure include acute lymphoblastic leukemia (ALL), acute myelogenous leukemia (AML), agnogenic myeloid metaplasia, astrocytoma, atypical teratoid rhabdoid tumor, brain and central nervous system (CNS) cancer, breast cancer, carcinosarcoma, chondrosarcoma, chordoma, choroid plexus carcinoma, choroid plexus papilloma, chronic lymphocytic leukemia (CLL), chronic myelogenous leukemia (CML), clear cell sarcoma of soft tissue, diffuse large B-cell lymphoma, ependymoma, epithelioid sarcoma, Ewing sarcoma, extragonadal germ cell tumor, extrarenal rhabdoid tumor, follicular lymphoma, gastrointestinal stromal tumor, glioblastoma, HBV-induced hepatocellular carcinoma, head and neck cancer, Hodgkin's lymphoma, juvenile myelomonocytic leukemia, kidney cancer, lung cancer, lymphoma, malignant rhabdoid tumor, medulloblastoma, melanoma, meningioma, mesothelioma, multiple myeloma, myeloma, neuroglial tumor, non-Hodgkin's lymphoma, not otherwise specified (NOS) sarcoma, oligoastrocytoma, oligodendroglioma, osteosarcoma, ovarian cancer, ovarian clear cell adenocarcinoma, ovarian endometrioid adenocarcinoma, ovarian serous adenocarcinoma, pancreatic cancer, pancreatic ductal adenocarcinoma, pancreatic endocrine tumor, pineoblastoma, prostate cancer, renal cell carcinoma, renal medullary carcinoma, rhabdomyosarcoma, sarcoma, schwannoma, skin squamous cell carcinoma, and/or stem cell cancer.

[0389] In various embodiments, methods and compositions of the present disclosure can be used to treat a hemoglobinopathy, red blood cell disorder, platelet disorder, and/or bone marrow disorder (e.g., a bone marrow failure condition).

[0390] In various embodiments, methods and compositions of the present disclosure can be used to treat an immune condition (e.g., an autoimmune condition). Examples of immune conditions (e.g., autoimmune conditions) that can be treated by methods and compositions of the present disclosure include acquired immunodeficiency syndrome (AIDS), acquired thrombotic thrombocytopenic purpura (aTTP), an autoimmune hematology, graft versus host disease (GVHD), Grave's Disease, inflammatory bowel disease, Multiple Sclerosis (MS), rheumatoid arthritis, severe aplastic anemia, and systemic lupus erythematosus (SLE).

[0391] In various embodiments, methods and compositions of the present disclosure can be used to treat an immunodeficiency (e.g., a primary immune deficiency, secondary immune deficiency, acquired immune deficiency, and/or an immune deficiency caused by trauma), an inflammatory condition, an IgG subclass deficiency, a complement disorders, or a specific antibody deficiency). In various embodiments, methods and compositions of the present disclosure can be used to eliminate or inhibit one or more subsets of lymphocytes (e.g., induce apoptosis in lymphocytes, inhibit lymphocyte activation, inhibit T cell activation, and/or inhibit Th-2 activity, and/or Th-1 activity), eliminate or inhibit autoreactive T cells, improve kinetics and/or clonal diversity of lymphocyte reconstitution, restore normal T lymphocyte development, restore thymic output, induce selective tolerance to an inciting agent, provide function to immune and other blood cells or treat an immune-mediated condition, In various embodiments, methods and compositions of the present disclosure can be used to normalize primary and secondary antibody responses to immunization.

[0392] In various embodiments, methods and compositions of the present disclosure can be used to treat and/or prevent an infection. In various embodiments, a compositions of the present disclosure is a vaccine in that it encodes, and/or expresses in one or more cells of a subject, an antigen characteristic of an infectious agent (e.g., a viral or bacterial pathogen). In various embodiments, a method of the present disclosure is a method of vaccination in that it delivers to one or more cells of a subject an antigen characteristic of an infectious agent (e.g., a viral or bacterial pathogen) and/or induces an immune responses against the antigen and/or infectious agent. In various embodiments, a method or composition of the present disclosure delivers (e.g., causes transient expression of) an antigen in a subject. In various embodiments, a method or composition of the present disclosure is used to treat a subject that has the infection. In various embodiments, a method or composition of the present disclosure is used to treat a subject that is at risk of infection.

[0393] In various embodiments, a method or composition of the present disclosure delivers to one or more cells of a subject in need thereof a coding sequence that encodes and/or expresses a replacement polypeptide (i.e., a wild type, reference, and/or functional polypeptide that corresponds to a disease variant encoded by the genome of the subject). In various embodiments, a method or composition of the present disclosure delivers to one or more cells of a subject in need thereof an editing system that modifies a nucleic acid of the subject (e.g., a genome of the subject) to express and/or increase expression of a wild type, reference, and/or functional polypeptide, e.g., by correction of a disease mutation present in the nucleic acid of the subject.

[0394] Particular examples of conditions that can be treated by methods and compositions of the present disclosure include conditions in which mutation of a globin gene results in expression of an abnormal form of hemoglobin (e.g., as in sickle cell disease (SCD) or hemoglobin C, D, or E disease) or results in reduced production of the α or β polypeptides (and thus an imbalance of the globin chains in the cell). These latter conditions are termed α- or β-thalassemias, depending on which globin chain is impaired. 5% of the world population carries a significant hemoglobin variant with the sickle cell mutation in the b-globin (HBB) gene (a glutamate to valine conversion; historically E6V, contemporaneously E7V) being by far the most common (40% of carriers). The high prevalence and severity of hemoglobin disorders presents a substantial burden, impacting not only the lives of those affected but also health-care systems, since lifelong patient care is costly.

[0395] There are two forms of hemoglobin, fetal (HbF), which includes two alpha (α) and two gamma (γ) chains, and adult (HbA), which includes two a and two beta (β) chains. The natural switch from HbF to HbA occurs shortly after birth and is regulated by transcriptional repression of γ globin genes by factors including a master regulator, bcl11a. Critically, a variety of clinical observations demonstrate that the severity of β-hemoglobinopathies such as sickle cell disease and β-thalassemia are ameliorated by increased production of HbF.

[0396] In particular embodiments, a therapeutically effective treatment induces or increases expression of HbF, induces or increases production of hemoglobin and/or induces or increases production of β-globin. In particular embodiments, a therapeutically effective treatment improves blood cell function, and/or increases oxygenation of cells.

[0397] In various embodiments, the present disclosure includes treatment of a blood disorder using an adenoviral donor vector of the present disclosure that includes a coding nucleic acid sequence that encodes a protein or agent for treatment of the blood disorder. In various embodiments, the blood disorder is thalassemia and the protein is a β-globin or γ-globin protein, or a protein that otherwise partially or completely functionally replaces β-globin or γ-globin. In various embodiments, the blood disorder is hemophilia and the protein is ET3 or a protein that otherwise partially or completely functionally replaces Factor VIII. In various embodiments, the blood disorder is a point mutation disease such as sickle cell anemia, and the agent is a gene editing protein.

[0398] ET3 can have or include the following amino acid sequence: SEQ ID NO 210. In various embodiments, a Factor VIII replacement protein can have an amino acid sequence having at least 70%, 75%, 80%, 85%, 90%, 91%, 92%, 93%, 94%, 95%, 96%, 97%, 98%, 99%, or 100% identity to the SEQ ID NO: 210

(MQLELSTCVFLCLLPLGFSAIRRYYLGAVELSWDYRQSELLRELHVDTR
FPATAPGALPLGPSVLYKKTVFVEFTDQLFSVARPRPPWMGLLGPTIQAE
VYDTVVVTLKNMASHPVSLHAVGVSFWKSSEGAEYEDHTSQREKEDDKVL
PGKSQTYVWQVLKENGPTASDPPCLTYSYLSHVDLVKDLNSGLIGALLVC
REGSLTRERTQNLHEFVLLFAVFDEGKSWHSARNDSWTRAMDPAPARAQP
AMHTVNGYVNRSLPGLIGCHKKSVYWHVIGMGTSPEVHSIFLEGHTFLVR
HHRQASLEISPLTFLTAQTFLMDLGQFLLFCHISSHHHGGMEAHVRVESC
AEEPQLRRKADEEEDYDDNLYDSDMDVVRLDGDDVSPFIQIRSVAKKHPK
TWVHYIAAEEEDWDYAPLVLAPDDRSYKSQYLNNGPQRIGRKYKKVRFMA
YTDETFKTREAIQHESGILGPLLYGEVGDTLLIIFKNQASRPYNIYPHGI
TDVRPLYSRRLPKGVKHLKDFPILPGEIFKYKWTVTVEDGPTKSDPRCLT
RYYSSFVNMERDLASGLIGPLLICYKESVDQRGNQIMSDKRNVILFSVFD
ENRSWYLTENIQRFLPNPAGVQLEDPEFQASNIMHSINGYVFDSLQLSVC
LHEVAYWYILSIGAQTDFLSVFFSGYTFKHKMVYEDTLTLFPFSGETVFM
SMENPGLWILGCHNSDFRNRGMTALLKVSSCDKNTGDYYEDSYEDISAYL
LSKNNAIEPRSFAQNSRPPSASAPKPPVLRRHQRDISLPTFQPEEDKMDY
DDIFSTETKGEDFDIYGEDENQDPRSFQKRTRHYFIAAVEQLWDYGMSES
PRALRNRAQNGEVPRFKKVVFREFADGSFTQPSYRGELNKHLGLLGPYIR
AEVEDNIMVTFKNQASRPYSFYSSLISYPDDQEQGAEPRHNFVQPNETRT
YFWKVQHHMAPTEDEFDCKAWAYFSDVDLEKDVHSGLIGPLLICRANTLN
AAHGRQVTVQEFALFFTIFDETKSWYFTENVERNCRAPCHLQMEDPTLKE
NYRFHAINGYVMDTLPGLVMAQNQRIRWYLLSMGSNENIHSIHFSGHVFS
VRKKEEYKMAVYNLYPGVFETVEMLPSKVGIWRIECLIGEHLQAGMSTTF
LVYSKKCQTPLGMASGHIRDFQITASGQYGQWAPKLARLHYSGSINAWST
KEPFSWIKVDLLAPMIIHGIKTQGARQKFSSLYISQFIIMYSLDGKKWQT
YRGNSTGTLMVFFGNVDSSGIKHNIFNPPIIARYIRLHPTHYSIRSTLRM
ELMGCDLNSCSMPLGMESKAISDAQITASSYFTNMFATWSPSKARLHLQG
RSNAWRPQVNNPKEWLQVDFQKTMKVTGVTTQGVKSLLTSMYVKEFLISS
SQDGHQWTLFFQNGKVKVFQGNQDSFTPVVNSLDPPLLTRYLRIHPQSWV
HQIALRMEVLGCEAQDLYV).

[0399] β-globin can have or include the following amino acid sequence: SEQ ID NO 211. In various embodiments, a β-globin replacement protein can have an amino acid sequence having at least 70%, 75%, 80%, 85%, 90%, 91%, 92%, 93%, 94%, 95%, 96%, 97%, 98%, 99%, or 100% identity to SEQ ID NO: 211

(MVHLTPEEKSAVTALWGKVNVDEVGGEALGRLLVVYPWTQRFFESFGDL
STPDAVMGNPKVKAHGKKVLGAFSDGLAHLDNLKGTFATLSELHCDKLHV
DPENFRLLGNVLVCVLAHHFGKEFTPPVQAAYQKVVAGVANALAHKYH).

[0400] γ-globin can have or include the following amino acid sequence: SEQ ID NO 212. In various embodiments, a γ-globin replacement protein can have an amino acid sequence having at least 70%, 75%, 80%, 85%, 90%, 91%, 92%, 93%, 94%, 95%, 96%, 97%, 98%, 99%, or 100% identity to SEQ ID NO: 212

(MGHFTEEDKATITSLWGKVNVEDAGGETLGRLLVVYPWTQRFFDSFGNL
SSASAIMGNPKVKAHGKKVLTSLGDATKHLDDLKGTFAQLSELHCDKLHV
DPENFKLLGNVLVTVLAIHFGKEFTPEVQASWQKMVTAVASALSSRYH).

[0401] In certain exemplary embodiments, a vector of the present disclosure selectively targets a hematopoietic cell type that is or includes T cells and/or a T cell progenitor cell type (e.g., a T cell progenitor cell type that is not a hematopoietic stem cell type, such as CLP cells). In certain exemplary embodiments, a vector of the present disclosure selectively targets a hematopoietic cell type that is or includes T cells and/or a T cell progenitor cell type and encodes a CAR in its genome. As is discussed elsewhere herein, infection and/or transduction of T cells and/or a T cell progenitor cell type by a vector that encodes a CAR in its genome (e.g., for in vivo gene therapy) is associated with certain therapeutic benefits. As compared modification of HSCs to encode and/or express a CAR (e.g., by in vivo gene therapy), modification of a more differentiated cell type (e.g., CLP cells or T cells) to encode and/or express a CAR (e.g., by in vivo gene therapy) shortens the time between modification of the cells and achieving certain, substantial, and/or therapeutically effective numbers or concentrations of T cells expressing the CAR in the subject. In various embodiments, a reduction in time to therapeutic efficacy can be accounted for, at least in part, by bypassing time required for engineered HSCs to produce (or produce a therapeutically effective number or concentration of) T cells expressing the CAR in the subject.

[0402] In various embodiments, a vector of the present disclosure that selectively targets a hematopoietic cell type that is or includes T cells and/or a T cell progenitor cell type (e.g., a T cell progenitor cell type that is not a hematopoietic stem cell type, such as CLP cells) can encode a CAR that has a particular target antigen and can be used for treatment of one or more particular types of cancer, e.g., as shown in Table 23 below. In various embodiments, a CAR can target more than one antigen simultaneously, and in various embodiments can be referred to as “dual-targeted” or “combo-targeted” CAR.

TABLE 23
Target Antigens of CARs Useful for Treatment of Particular Types of Cancer

| Target Antigen | Cancer | Further Description |
|---|---|---|
| CD19 | BALL | See clinical trial NCT01044069 |
| CD19 | B-CLL | See clinical trial NCT00466531 |
| CD19 | Leukemia | See clinical trial NCT01416974 |
| CD19 | Lymphoma | See clinical trial NCT00586391 |
| CD19 | B-NHL/CLL | See clinical trial NCT00608270 |
| CD20 | Mantel cell leukemia/B-NHL | See clinical trial NCT00621452 |
| CD22 | Non-Hodgkins Lymphoma | See clinical trial NCT02315612 |
| CD19/CD20 | B-Non Hodgkins Lymphoma | See clinical trial NCT00621452 |
| CD19/CD22 | B-cell malignancy | See clinical trial NCT03185494 |
| CD133 | Hepatocellular carcinoma | See clinical trial NCT02541370 |
| CD171 | Neuroblastoma | See clinical trial NCT02311621 |
| PMSA (prostate-specific membrane | Prostate cancer | See clinical trial NCT001140373 |
| antigen) | | |
| CEA | Breast cancer | See clinical trial NCT00673829 |
| CEA | Colorectal cancer | See clinical trial NCT00673827 |
| CEA | Lungs cancer | See clinical trial NCT00673322 |
| HER-2 | Lungs cancer | See clinical trial NCT00889954 |
| HER-2 | Osteosarcoma | See clinical trial NCT00902044 |
| HER-2 | Glioblastoma | See clinical trial NCT01109095 |
| CD30 | Lymphoma | See clinical trial NCT02274584 |
| FAP | Malignant pleural mesothelioma | See clinical trial NCT01722149 |
| NKGD2 (natural killer group 2 | Leukemia | See clinical trial NCT02203825 |
| member D) | | |
| GD2 (disganglioside molecule) | Neuroblastoma, osteosarcoma | See clinical trial NCT03356795 |
| EGFRVIII (epidermal growth factor | Glioblastoma | See clinical trial NCT02309373 |
| receptor variant III) | | |
| Mesothelin | Pancreatic cancer | See clinical trial NCT02706782 |
| CD38/CD123 | B-Cell Malignancies | See clinical trial NCT03125577 |
| ROR1 (receptor tyrosine kinase- | Chronic lymphocytic leukemia | See clinical trial NCT02194374 |
| like orphan receptor 1) | | |
| MUC16 (CA125) | Ovarian carcinoma | See clinical trial NCT02498912 |
| GPC3 (glypican 3) | Lung squamous cell carcinoma | See clinical trial NCT03198546 |
| VEGFRII (vascular endothelial | Renal cancer | See clinical trial NCT01218867 |
| growth factor receptor II) | | |
| CD 19 and CD 22 | B cell malignancies | One CAR with two binding sites; 4- |
| | | 1BB co-stimulation domain |
| CD 19 and CD 20 | B-NHL | One CAR with two binding sites; 4- |
| | | 1BB co-stimulation domain |
| CD 19 and CD 22 | B-ALL | One vector encoding two CARs; 4- |
| | | 1BB co-stimulation domain for CD |
| | | 19, OX4O co-stimulation domain |
| | | for CD 22 |
| CD 19 and CD 22 | DLBCL | One vector encoding two CARs; 4- |
| | | 1BB co-stimulation domain for CD |
| | | 19, OX4O co-stimulation domain |
| | | for CD 22 |
| CD 19 and CD 22 | B-ALL | One CAR with two binding sites; 4- |
| | | 1BB co-stimulation domain |
| CD 19 and CD 22 | B-ALL | One CAR with two binding sites; 4- |
| | | 1BB co-stimulation domain |
| CD 19 and CD 22 | B-ALL | Two vectors encoding two CAR; 4- |
| | | 1BB co-stimulation domain and |
| | | extra PD-L1 co-stimulation domain |
| | | for CD 22 |
| CD 19 and CD 22 | B-ALL | One CAR with two binding sites; 4- |
| | | 1BB co-stimulation domain |
| CD 19 and CD 22 | B-ALL | Two vectors encoding two CARS; |
| | | 4-1BB co-stimulation domain |
| CD 19 and CD 22 | B-ALL | Manufacture and infuse separately; |
| | | CD 28 and 4-1BB co-stimulation |
| | | domains for both CAR |
| CD 19 and CD 22 | B-NHL | Manufacture and infuse separately; |
| | | CD 28 and 4-1BB co-stimulation |
| | | domains for both CAR |
| EGFR (epidermal growth factor | Lung, liver, stomach | See clinical trials NCT03179007, |
| receptor) | | NCT03525782 (Phase 1/2) |
| HER2 (human epidermal growth | Central nervous system tumor, | See clinical trial NCT03500991 |
| factor receptor 2) | pediatric glioma | (Phase 1) |
| EGFR806 | Central nervous system tumor, | See clinical trial NCT03179012 |
| | pediatric glioma | (Phase 1) |
| Mesothelin | Ovarian, cervical, pancreatic, lung | See clinical trial NCT01583686 |
| | | (Phase 1/2) |
| PSCA (prostate stem cell antigen) | Lung | See clinical trial NCT03198052 |
| | | (Phase 1) |
| MUC1 (mucin1) | Advanced solid tumors, lung | See clinical trials NCT03179007, |
| | | NCT03525782 (Phase 1/2) |
| Claudin 18.2 | Advanced solid tumor | See clinical trial NCT03874897 |
| | | (Phase 1) |
| EpCAM (epithelial cell adhesion | Colon, pancreatic, prostate, gastric, | See clinical trial NCT03013712 |
| molecule) | liver | (Phase 1/2) |
| GD2 | Brain | See clinical trial NCT04099797 |
| | | (Phase 1) |
| VEGFR2 | Melanoma, brain | See clinical trial NCT01218867 |
| | | (Phase 1) |
| AFP (alpha-fetoprotein) | Hepatocellular carcinoma liver | See clinical trial NCT03349255 |
| | cancer | (Phase 1) |
| Nectin4/FAP (familial adenomatous | Nectin4-positive advanced | See clinical trial NCT03932565 |
| polyposis) | malignant solid tumor | (Phase 1) |
| CEA (carcinoembryonic antigen) | Lung, colorectal, gastric, breast, | See clinical trial NCT02349724 |
| | pancreatic cancer | (Phase 1) |
| Lewis Y | Advanced cancer | See clinical trial NCT03851146 |
| | | (Phase 1) |
| Glypican-3 | Liver | See clinical trial NCT02932956 |
| | | (Phase 1) |
| EGFRIII | Glioblastoma and brain tumor | See clinical trial NCT01454596 |
| | | (Phase 1) |
| IL-13Rα2 | Glioblastoma | See clinical trial NCT02208362 |
| | | (Phase 1) |
| CD171 | Neuroblastoma | See clinical trial NCT02311621 |
| | | (Phase 1) |
| MUC16 (mucin16) | Ovarian | See clinical trial NCT02311621 |
| | | (Phase 1) |
| PSMA (prostate-specific membrane | Prostate | See clinical trial NCT01140373 |
| antigen) | | (Phase 1) |
| AFP | Hepatocellular carcinoma, liver | See clinical trial NCT03349255 |
| | | (Phase 1) |
| AXL (AXL receptor tyrosine | Renal | See clinical trial NCT03393936 |
| kinase) | | (Phase 1) |
| CD20 | Melanoma | See clinical trial NCT03893019 |
| | | (Phase 1) |
| CD80/86 | Lung | See clinical trial NCT03198052 |
| | | (Phase 1) |
| c-MET | Breast, hepatocellular | See clinical trials NCT03060356, |
| | | NCT03638206 (Phase 1) |
| DLL-3 (delta-like 3) | Lung | See clinical trial NCT03392064 |
| | | (Phase 1) |
| DR5 (death receptor 5) | Hepatoma | See clinical trial NCT03638206 |
| | | (Phase 1) |
| EpHA2 (EPH receptor A2) | Glioma | See clinical trial NCT02575261 |
| | | (Phase 1) |
| FR-α (folate receptor alpha) | Ovarian | See clinical trial NCT00019136 |
| | | (Phase 1) |
| gp100 | Melanoma | See clinical trial NCT03649529 |
| | | (Phase 1) |
| MAGE (melanoma antigen gene | Lung | See clinical trials NCT03356808, |
| protein)-A1/3/4 | | NCT03535246 (Phase 1) |
| LMP1 (Epstein-Barr virus latent | Nasopharyngeal | See clinical trial NCT02980315 |
| membrane protein 1) | | (Phase 1) |

[0403] In certain embodiments, methods and compositions of the present disclosure can be used for treating a human, primate, non-human primate, or mammal. In various embodiments, methods and compositions of the present disclosure can be used for treating an animal. In various embodiments, methods and compositions of the present disclosure can be used for treating an animal such as a dog, cat, bird, chicken, reptile, horse, cow, pig, goat, mouse, rodent, or rat.

### EXAMPLES

[0404] The present Examples demonstrate that certain adenoviral serotypes are particularly effective for infection of hematopoietic cells (e.g., one or more particular types of hematopoietic cells). Because hematopoietic cells (e.g., one or more particular types of hematopoietic cells) are a therapeutically important target for gene therapy, identification of vectors effective for their transduction is of substantial clinical importance. The present Examples illustrate certain clinically relevant applications of engineered adenoviral vectors that selective target hematopoietic cells (e.g., one or more particular types of hematopoietic cells).

### Example 1: Analysis of Adenoviral Vector Infection of CD34+ Cells by Anti-Hexon Staining

[0405] Preset Examples 1 and 2 demonstrate that certain adenoviral serotypes are particularly effective for infection of CD34+ cells such as HSCs. Because HSCs are a therapeutically important target for gene therapy, identification of vectors effective for transduction of CD34+ cells is of substantial clinical importance. Certain tested adenoviral serotypes were similarly or more effective for infection of CD34+ cells than others commonly associated with gene therapy trials and research, such as Ad5 and Ad5/35++.

[0406] The present example utilizes anti-hexon staining to measure the infection of CD34+ cells by various adenoviral vectors. Serotypes used in experiments of this Example included Ad3, Ad5, Ad7, Ad11, Ad14, Ad16, Ad21, Ad26, Ad34, Ad35, Ad37, Ad48, Ad50, and Ad52, as well as an Ad5/35++ vector including E1 deletion (“F35”). Vectors were wild type human adenoviral vectors except as otherwise noted.

[0407] Human CD34+ cells (REF: 4Y-101C, LOT: 3038009, Donor ID: 15846) were infected with wild type human adenoviruses (identified by Ad type number) with 5,000 or 2,000 viral particles per cell (vp/c). Three hours post-incubation, cells were first washed with phosphate buffered saline (PBS), quickly trypsinized to remove all extracellular viral particles, and washed with PBS. Washed cells were then split into two aliquots utilized in the present Example for analysis of intra-cellular adenovirus particles by anti-hexon staining and in Example 2 for analysis of adenoviral DNA internalization by qPCR, respectively. A replicate trial was additionally conducted in which CD34+ cells were infected at 2,000, 10,000, and 20,000 viral particles per cell (vp/c).

[0408] In the present Example, cells were first fixed with fixation medium (Thermofisher) for 15 minutes at room temperature. After a PBS washing step, cells were resuspended in permeabilization medium (Thermofisher). Anti-adenovirus hexon antibody (clone 20/11, MAB8052, Sigma) was added to the permeabilization medium and incubated at 4° C. overnight. On the second day, cells were washed twice with PBS and stained with the Alexa Fluor 488-labeled secondary antibody (Catalog #A-21121, Thermofisher) in permeabilization medium. Staining was stopped with two PBS washing steps, and the cells were analyzed on a Beckman Coulter Gallios Flow Cytometer. Background signal was obtained by analyzing the isotype control, which refers to uninfected cells stained with the same antibodies as the sample. The percentage of FITC positive cells is displayed in the FIG. 1. For each virus two samples are shown for each virus dose.

[0409] Results of anti-hexon staining are provided in FIG. 1. Reference serotypes in this Example, as shown in FIG. 1, include Ad5 and Ad5/35++(F35) serotypes that are often used, e.g., that have been used in gene therapy research or adenoviral vector constructs. Unexpectedly, several adenoviral vector serotypes consistently outperformed these reference serotypes for internalization into CD34+ cells. These included Ad3, 7, 11, 14, 16, 21, 34, 35, and 50. By contrast, serotypes Ad26, Ad37, Ad48, and Ad52 consistently did not outperform reference serotypes for internalization into CD34+ cells. These data demonstrate that Ad3, 7, 11, 14, 16, 21, 34, 35, and 50 are particularly and unexpectedly useful for engineering of vectors for transduction of CD34+ cells such as HSCs.

### Example 2: Analysis of the Internalization of Adenovirus Particles into CD34+ Cells by qPCR

[0410] The present example utilizes qPCR to measure the internalization of adenovirus particles into CD34+ cells by various adenoviral serotypes. Serotypes used in experiments of this Example included Ad3, Ad5, Ad7, Ad1, Ad14, Ad16, Ad21, Ad26, Ad34, Ad37, Ad35, Ad48, Ad50, and Ad52, as well as Ad5/35++ vector including an E1 deletion (“F35”). The viruses used were purified wild type human adenoviruses except as otherwise noted. Cells were prepared as described in Example 1.

[0411] In the present Example, total genomic DNA was isolated using the Monarch® Genomic DNA Purification Kit (NEB). For qPCR analyses, samples were split into two experiments: Ad3, 7, 11, 14, 16, 21, 34, 35, and 50 in a first experiment; and Ad26, Ad37, Ad48, Ad52, Ad5, and F35 in a second experiment. For the first experiment, primers and probe targeting DNA polymerase were used for amplification and a plasmid containing the Ad35 genome (pAd35) was used to generate a standard curve. For the second experiment, primers and probe targeting hexon were used for amplification and a plasmid containing the Ad5 genome (pAd5) was used to generate a standard curve. For normalization, primers that amplify the gene hB2M were applied.

[0412] Results of the qPCR analyses of this Example are provided in FIG. 2. Broadly, viral copy number per cell was highest using Ad7, Ad11, Ad14, Ad16, Ad21, Ad34, Ad35, Ad50, and F35. Viral copies per cell were also detected for Ad3, Ad37, Ad48, Ad52, and Ad5. Viral copy number per cell was lowest for Ad26.

### Example 3: Identification of Adenoviral Vectors that Selectively Target a Particular Hematopoietic Cell Type

[0413] The present Example provides approaches for identifying adenoviral vectors that selectively target particular hematopoietic cell types. In various embodiments, an anti-hexon staining method, a qPCR method, and/or a fluorescent protein expression-based method can be applied to compare preferential targeting of a hematopoietic cell type of interest as compared to a reference hematopoietic cell type. A cell type of interest can be, for example, T cells (e.g., CD8+ and/or CD4+ T cells), B cell plasmablasts, B cells (e.g., memory B cells), NK cells, or progenitor cells (e.g., CLPs). A reference can be any type or types of hematopoietic stem cells that are not the target of interest, including without limitation HSCs. Data can further be analyzed by comparison to a negative control, e.g., uninfected cells.

[0414] Approaches described in this Example can be carried out using various types of samples Approaches described in this Example can be carried out by infection of cell samples that represent isolated samples of one or more particular cell types (e.g., an isolated target cell type and/or an isolated reference cell type). Approaches described in this Example can be carried out by infection of cell samples that represent samples that include a mixture of one or more hematopoietic cell types (including one or more of a target cell type and/or a reference cell type). In various embodiments, cells of one or more particular types (e.g., a target cell type and/or a reference cell type) can be distinguished before or after assaying infection according to one or more approaches set forth in this Example. Methods of distinguishing hematopoietic cell types are known in the art and include the evaluation of cell type markers.

[0415] Hexon staining includes infecting target and reference cells with one or more Ad vectors. Cells are assayed three hours post-incubation. The assay includes washing cells with phosphate buffered saline (PBS), quickly trypsinizing cells to remove all extracellular viral particles, and washing again with PBS. Cells are then fixed with fixation medium (Thermofisher) for 15 minutes at room temperature. After a PBS washing step, cells are resuspended in permeabilization medium (Thermofisher). Anti-adenovirus hexon antibody (clone 20/11, MAB8052, Sigma) is then added to the permeabilization medium and samples are incubated at 4° C. overnight. On the second day, cells are washed twice with PBS and stained with the Alexa Fluor 488-labeled secondary antibody (Catalog #A-21121, Thermofisher) in permeabilization medium. Staining is stopped with two PBS washing steps, and cells are analyzed on a Beckman Coulter Gallios Flow Cytometer. Background signal is obtained by analyzing the negative control, which refers to uninfected cells stained with the same antibodies as the sample. The percentage of FITC positive cells is determined.

[0416] qPCR analysis includes infecting target and reference cells with one or more Ad vectors. Cells are assayed three hours post-incubation. The assay includes washing cells with phosphate buffered saline (PBS), quickly trypsinizing cells to remove all extracellular viral particles, and washing again with PBS. Total genomic DNA is then isolated from cells. Primers and probes targeting one or more vector genome sequences (e.g., a hexon-encoding sequence) can be used for qPCR. For normalization, primers and probes targeting a housekeeping gene can be used.

[0417] Fluorescent protein expression-based analysis includes infecting target and reference cells with one or more Ad vectors that include an Ad genome encoding a fluorescent protein such as a Green Fluorescent Protein (GFP) or mCherry. The fluorescent protein is encoded by an integrating element of the Ad genome, and is expressed after integration. Accordingly, detection of fluorescence by each cell type tested is indicative of transduction.

### Example 4: Infection of T-Cells by Adenoviral Vectors Encoding a Chimeric Antigen Receptor

[0418] The present Example includes identification of an adenoviral vector that selectively targets CD8+ T cells according to one or more approaches set forth in Example 3, and use thereof to introduce into CD8+ T cells a nucleic acid payload encoding a CAR. Without limiting the disclosure, exemplary adenoviral vectors that selectively target CD8+ T cells can include adenoviral vectors of serotypes Ad5, Ad16, Ad34, Ad35, and Ad35++. Selected adenoviral vectors are engineered to include an adenoviral vector genome that includes a payload that encodes a CAR. The nucleic acid sequence encoding the CAR is an integrating nucleic acid sequence. Engineered adenoviral vectors including the nucleic acid sequence encoding the CAR, in combination where applicable with a support vector of the same serotype (e.g., single or chimeric serotype), are administered to a subject or system such as a human patient in need thereof. The nucleic acid sequence encoding the CAR is integrated into the genome of CD8+ T cells of the recipient subject or system, providing a therapeutic benefit where applicable. Certain produced cells can be referred to as CAR-T cells. Gene therapy according to this example can be characterized by therapeutically advantageous properties including immediacy of effect and transiency of effect.

### Example 5: Infection of NK Cells by Adenoviral Vectors Encoding a Chimeric Antigen Receptor

[0419] The present Example includes identification of an adenoviral vector that selectively targets NK cells according to one or more approaches set forth in Example 3, and use thereof to introduce into NK cells a nucleic acid payload encoding a CAR. Without limiting the disclosure, exemplary adenoviral vectors that selectively target NK cells can include adenoviral vectors of serotypes Ad11, Ad16, Ad34, Ad35, and Ad35++. Selected adenoviral vectors are engineered to include an adenoviral vector genome that includes a payload that encodes a CAR. The nucleic acid sequence encoding the CAR is an integrating nucleic acid sequence. Engineered adenoviral vectors including the nucleic acid sequence encoding the CAR, in combination where applicable with a support vector of the same serotype (e.g., single or chimeric serotype), are administered to a subject or system such as a human patient in need thereof. The nucleic acid sequence encoding the CAR is integrated into the genome of NK cells of the recipient subject or system, providing a therapeutic benefit where applicable. Certain produced cells can be referred to as CAR-NK cells. Gene therapy according to this example can be characterized by therapeutically advantageous properties including immediacy of effect and transiency of effect.

### Example 6: Infection of Monocytes by Adenoviral Vectors Encoding a Chimeric Antigen Receptor

[0420] The present Example includes identification of an adenoviral vector that selectively targets monocytes according to one or more approaches set forth in Example 3, and use thereof to introduce into monocytes a nucleic acid payload encoding a CAR. Without limiting the disclosure, exemplary adenoviral vectors that selectively target monocytes cells can include adenoviral vectors of serotypes Ad11, Ad16, Ad34, Ad35, and Ad35++. Selected adenoviral vectors are engineered to include an adenoviral vector genome that includes a payload that encodes a CAR. The nucleic acid sequence encoding the CAR is an integrating nucleic acid sequence. Engineered adenoviral vectors including the nucleic acid sequence encoding the CAR, in combination where applicable with a support vector of the same serotype (e.g., single or chimeric serotype), are administered to a subject or system such as a human patient in need thereof. The nucleic acid sequence encoding the CAR is integrated into the genome of monocytes of the recipient subject or system, providing a therapeutic benefit where applicable. Certain produced cells can be referred to as CAR-M cells. Gene therapy according to this example can be characterized by therapeutically advantageous properties including immediacy of effect and transiency of effect.

### Example 7: Infection of Progenitor Cells by Adenoviral Vectors Encoding a Chimeric Antigen Receptor

[0421] The present Example includes identification of an adenoviral vector that selectively targets progenitor cells such as CLP cells according to one or more approaches set forth in Example 3, and use thereof to introduce into progenitor cells such as CLP cells a nucleic acid payload encoding a CAR. Selected adenoviral vectors are engineered to include an adenoviral vector genome that includes a payload that encodes a CAR. The nucleic acid sequence encoding the CAR is an integrating nucleic acid sequence. Engineered adenoviral vectors including the nucleic acid sequence encoding the CAR, in combination where applicable with a support vector of the same serotype (e.g., single or chimeric serotype), are administered to a subject or system such as a human patient in need thereof. The nucleic acid sequence encoding the CAR is integrated into the genome of progenitor cells such as CLP cells of the recipient subject or system, providing a therapeutic benefit where applicable. Gene therapy according to this example can be characterized by therapeutically advantageous properties including expression of CAR by multiple lineages including production of CAR-T cells and engineered B cells.

### Example 8: Infection of B Cell Plasmablasts by Adenoviral Vectors Encoding an Antibody

[0422] The present Example includes identification of an adenoviral vector that selectively targets B cell plasmablasts according to one or more approaches set forth in Example 3, and use thereof to introduce into B cell plasmablasts a nucleic acid payload encoding an antibody. Selected adenoviral vectors are engineered to include an adenoviral vector genome that includes a payload that encodes an antibody. The nucleic acid sequence encoding the antibody is an integrating nucleic acid sequence. Engineered adenoviral vectors including the nucleic acid sequence encoding the antibody, in combination where applicable with a support vector of the same serotype (e.g., single or chimeric serotype), are administered to a subject or system such as a human patient in need thereof. The nucleic acid sequence encoding the antibody is integrated into the genome of B cell plasmablasts of the recipient subject or system, providing a therapeutic benefit where applicable. B cell plasmablasts are understood to be short-lived, but efficient for antibody secretion. Gene therapy according to this example can be characterized by therapeutically advantageous properties including immediacy of effect and transiency of effect.

### Example 9: Infection of Memory B Cells by Adenoviral Vectors Encoding an Antibody

[0423] The present Example includes identification of an adenoviral vector that selectively targets memory B cells according to one or more approaches set forth in Example 3, and use thereof to introduce into memory B cells a nucleic acid payload encoding an antibody. Without limiting the disclosure, exemplary adenoviral vectors that selectively target memory B cells can include adenoviral vectors of serotype Ad16. Selected adenoviral vectors are engineered to include an adenoviral vector genome that includes a payload that encodes an antibody. The nucleic acid sequence encoding the antibody is an integrating nucleic acid sequence. Engineered adenoviral vectors including the nucleic acid sequence encoding the antibody, in combination where applicable with a support vector of the same serotype (e.g., single or chimeric serotype), are administered to a subject or system such as a human patient in need thereof. The nucleic acid sequence encoding the antibody is integrated into the genome of memory B cells of the recipient subject or system, providing a therapeutic benefit where applicable. Memory B cells are understood to produce and/or constitute a quiescent pool that can yield activated plasma B cells under inducing conditions. Gene therapy according to this example can be characterized by therapeutically advantageous properties including long-term potential efficacy.

### Example 10: Identification of Adenoviral Vectors that Selectively Target Monocytes, T Cells, NK Cells, and B Cells

[0424] The present Example demonstrates the identification of certain adenoviral serotypes that are particularly effective for infection of particular hematopoietic cell types (e.g., monocytes, T cells, NK cells, and B cells). First generation adenoviral vectors of various adenoviral serotypes encoding a green fluorescent protein (GFP) reporter gene were used to transduce cells of various cell types to determine the adenoviral serotypes that are particularly effective for each cell type. Serotypes tested in the present Example include Ad5, Ad7, Ad11, Ad16, Ad34, and Ad35, as well as an Ad35 vector with an Ad35++ fiber knob (“Ad35++”).

[0425] First generation adenoviral genomes were generated from wild-type A5, Ad7, Ad11, Ad16, Ad34, and Ad35 genomes. Relative to the wild-type adenoviral genomes, first generation adenoviral genomes were engineered to have the E1 region (E1a and E1b) deleted and replaced with a GFP reporter gene under the control of an EF1α promoter and a bovine growth hormone (BGH) polyadenylation signal. First generation A7, Ad11, Ad16, Ad34, Ad35, and Ad35++ genomes additionally included deletion of the endogenous E4orf6 region and replacement with an Ad5 E4orf6 regions to facilitate propagation of the first-generation adenoviral vectors in HEK293 cells. Those of skill in the art will understand that replacement of the endogenous E4orf6 regions with an Ad5 E4orf6 region is not required for generation of adenoviral vectors of the present disclosure. Furthermore, first generation Ad35++ genomes included a mutant Ad35++ fiber knob, as described elsewhere herein. Schematics of plasmids encoding the first generation adenoviral genomes are shown in FIGS. 4-11.

[0426] Plasmids encoding the first generation adenoviral genomes were digested using restriction enzymes to release the adenoviral genomes, which were subsequently purified. To produce first generation adenoviral vectors, HEK293 cells seeded in 6 cm dishes were transfected with 4 μg of the purified adenoviral genomic DNA using OPTIMUS transfection reagent (polyPlus, 101000006), according to manufacturer's suggested protocol. Cell culture media was replaced 4 hours after transfection or the following day. Once cytopathic effect (CPE) was observed (typically 2-5 days after transfection), the cell-virus lysate was collected and used for serial vector amplification in HEK293 cells using a third of the lysate from the previous step. Large-scale vector production was performed using 20-30 dishes (15 cm) of HEK293 cells infected at 95% confluency. After two days and visible CPE, the cells were harvested. First generation adenoviral vectors were purified using CsCl gradients and ultracentrifugation, as previously described in Jager and Ehrhardt, Hum Gene Ther, 20(8):883-896 (2009), followed by dialysis. The purified viral titer was determined by measuring the optical density using the formula: optical units per mL (OPU)=(absorbance at 260 nm)×(dilution factor)×(1.1×10¹²)×36/(size of adenoviral genome in kb). Successful production of first generation adenoviral vectors was confirmed by restriction enzyme digestion of adenoviral genomic DNA isolated from the adenoviral vectors.

[0427] To identify the adenoviral serotypes that are particularly effective for infection of particular hematopoietic cell types, human peripheral blood mononuclear cells (PBMCs) from two donors (Donor 1 and Donor 2) were infected with the purified first generation adenoviral vectors. First generation Ad16 vector was not used in experiments using PBMCs from Donor 2. For infection, 600,000 cells were infected in a volume of less than 200 μl of culture media (RPMI with 10% fetal bovine serum) in ultralow attachment plates. Cells were infected at a multiplicity of infection (MOI) of 500, 2000, and 5000 viral particles per cell. Culture media was changed three hours post-infection.

[0428] Flow cytometry was used to analyze the PBMCs 48 hours post-infection. The PBMCs were wash with 0.5% BSA in PBS and resuspended in blocking buffer (47 μl Brilliant Stain Buffer (BD Biosciences) with 3 μl human TruStain FcX (BioLegend)) at 4° C. for 15 minutes. To distinguish various hematopoietic cell types present in the PBMCs, the cells were separately stained using each of two cocktails of antibodies (Tables 24 and 25). The antibodies were separated into two cocktails to avoid spectral overlap. 50 μl of the antibody cocktails were incubated with the samples 4° C. for 20 minutes, followed by a wash using 0.5% BSA in PBS. For Donor 1, samples were incubated in 5% 7AAD in Brilliant Stain Buffer at 4° C. for 20 minutes for live cell discrimination. Samples were analyzed using a CytoFLEX flow cytometer (Beckman Coulter). Infected cells could be identified by detecting GFP payload expression. Each sample was collected in technical duplicate.

TABLE 24
Antibody Cocktail 1

| Component | Format | Amount |
|---|---|---|
| anti-CD45 | BV605/V610 | 2 μl |
| anti-CD3 | BV421/PB450 | 2 μl |
| anti-CD56 | PE-Cy7/PC7 | 2 μl |
| Buffer | Brilliant Stain Buffer | 44 μl |

TABLE 25
Antibody Cocktail 2

| Component | Format | Amount |
|---|---|---|
| anti-CD45 | BV605/V610 | 2 μl |
| anti-CD20 | APC | 2 μl |
| anti-CD14 | BV421/PB450 | 2 μl |
| anti-CD11 | PE-Cy7/PC7 | 1 μl |
| Buffer | Brilliant Stain Buffer | 43 μl |

[0429] The flow cytometry data was analyzed to identify particular hematopoietic cell types present in the PBMCs. From 7AAD negative cells (live cells) (Donor 1) or all cells (Donor 2), CD45+ leukocytes were identified. The leukocyte population was separated into lymphoid and myeloid cell populations based on forward scatter (FSC) and side scatter (SSC). From the myeloid population, CD11+/CD14+ monocytes were identified. From the lymphoid population, CD3+ T cells, CD3−/CD56+NK cells, and CD20+ B cells were identified. Within each cell type population (i.e., monocytes, T cells, NK, cells, and B cells), the percentage of GFP positive cells was quantified and used to determine the adenoviral serotypes that are particularly effective for infection the cell type. An exemplary gating strategy is shown in FIG. 11.

[0430] Results for each of the cell types are shown for Donor 1 in FIGS. 12-15 and for Donor 2 in FIGS. 16-19. Donor 1 monocytes were preferentially infected by first generation Ad11, Ad16, Ad34, Ad35, and Ad35++ vectors (FIG. 12). Donor 2 monocytes were preferentially infected by first generation Ad11, Ad34, Ad35, and Ad35++ vectors (FIG. 16). Monocytes showed higher infection rate (percentage of GFP positive) as compared to the lymphoid cells (i.e., T cells, NK cells, and B cells), which, without wishing to be bound by any particular theory, may be due to the phagocytic activity of monocytes. Donor 1 T cells were preferentially infected by first generation Ad5, Ad16, Ad34, and Ad35 vectors (FIG. 13). Donor 2 T cells were preferentially infected by first generation Ad34, Ad35, Ad35++(FIG. 17). Donor 1 NK cells were preferentially infected by first generation Ad1, Ad16, Ad34, Ad35, and Ad35++ vectors (FIG. 14). Donor 2 NK cells were preferentially infected by first generation Ad11, Ad34, Ad35, and Ad35++ vectors (FIG. 18). Donor 1 B cells were preferentially infected by first generation Ad16 vectors (FIG. 15). These data demonstrate that serotypes Ad5, Ad11, Ad16, Ad34, Ad35, and Ad35++ can be engineered into vectors for transduction of particular hematopoietic cell types.

### Accession Sequences

[0431] Provided herein is a listing of nucleic acid sequences and amino acid sequences corresponding to publicly available sequence accession numbers, certain of which sequences and/or sequence accession numbers are included and/or utilized, in whole and/or in part, in the present disclosure, and/or certain of which sequences and/or sequence accession numbers are included herein as references. Sequences associated with accession numbers are available in publicly accessible databases, as is known to those of skill in the art, and such sequences are provided herein solely for easy for reference.

GenBank Accession No. AP_000601 (SEQ ID NO: 256)

MTKRVRLSDSFNPVYPYEDESTSQHPFINPGFISPNGFTQSPDGVLTLKC
LTPLTTTGGSLQLKVGGGLTVDDTDGTLQENIRATAPITKNNHSVELSIG
NGLETQNNKLCAKLGNGLKENNGDICIKDSINTLWTGINPPPNCQIVENT
NINDGKLTLVLVKNGGLVNGYVSLVGVSDTVNQMFTQKTANIQLRLYFDS
SGNLLTEESDLKIPLKNKSSTATSETVASSKAFMPSTTAYPFNTTTRDSE
NYIHGICYYMTSYDRSLFPLNISIMLNSRMISSNVAYAIQFEWNLNASES
PESNIATLTTSPFFFSYITEDDN

GenBank Accession No. NC_011203 (SEQ ID NO: 199)

CTATCTATATAATATACCTTATAGATGGAATGGTGCCAACATGTAAATGAGGTAATTTAAAAAAGTGCGCGCTGTGT
GGTGATTGGCTGCGGGGTTAACGGCTAAAAGGGGCGGCGCGACCGTGGGAAAATGACGTGACTTATGTGGGAGGAGT
TATGTTGCAAGTTATTACGGTAAATGTGACGTAAAACGAGGTGTGGTTTGAACACGGAAGTAGACAGTTTTCCCACG
CTTACTGACAGGATATGAGGTAGTTTTGGGCGGATGCAAGTGAAAATTCTCCATTTTCGCGCGAAAACTAAATGAGG
AAGTGAATTTCTGAGTCATTTCGCGGTTATGCCAGGGTGGAGTATTTGCCGAGGGCCGAGTAGACTTTGACCGTTTA
CGTGGAGGTTTCGATTACCGTGTTTTTCACCTAAATTTCCGCGTACGGTGTCAAAGTTCTGTGTTTTTACGTAGGTG
TCAGCTGATCGCTAGGGTATTTAAACCTGACGAGTTCCGTCAAGAGGCCACTCTTGAGTGCCAGCGAGAAGAGTTTT
CTCCTCCGCGCCGCAAGTCAGTTCTGCGCTTTGAAAATGAGACACCTGCGCTTCCTGCCACAGGAGGTTATCTCCAG
TGAGACCGGGATCGAAATACTGGAGTTTGTGGTAAATACCCTAATGGGAGACGACCCGGAACCGCCAGTGCAGCCTT
TCGATCCACCTACGCTGCACGATCTGTATGATTTAGAGATAGACGGGCCGGAGGATCCCAATGAGGAAGCTGTGAAT
GGGTTTTTTACTGATTCTATGCTGCTAGCTGCTGATGAAGGATTGGACATAAACCCTCCTCCTGAGACACTTGTTAC
CCCAGGGGTGGTTGTGGAAAGCGGCATAGGTGGGAAAAAATTGCCTGATCTGGGAGCAGCTGAAATGGACTTGCGTT
GTTATGAAGAGGGTTTTCCTCCCAGTGATGATGAAGATGGGGAAACTGAGCAGTCCATCCATACCGCAGTAAATGAG
GGAGTAAAAGCTGCCAGCGATGTTTTTAAGTTGGACTGTCCGGAGCTGCCTGGACATGGCTGTAAGTCTTGTGAATT
TCACAGGAATAACACTGGAATGAAAGAACTATTGTGCTCGCTTTGCTATATGAGAATGCACTGCCACTTTATTTACA
GTAAGTGTATTTAAGTGAAATTTAAAGGAATAGTGTAGCTATTTAATAACTGTTGAATGGTAGATTTATGTTTTTTT
CTTGCGATTTTTTGTAGGTCCTGTGTCTGATGATGAGTCACCTTCTCCTGATTCAACTACCTCACCTCCTGAAATTC
AGGCGCCCGCACCTGCAAACGTATGCAAGCCCATTCCTGTGAAGCCTAAGCCTGGGAAACGCCCTGCTGTGGATAAG
CTTGAGGACTTGTTGGAGGGTGGGGATGGACCTTTGGACCTTAGTACCCGGAAACTGCCAAGGCAATGAGTGCCCTG
CAGCTGTGTTTATTTAATGTGACGTCATGTAATAAAATTATGTCAGCTGCTGAGTGTTTTATTACTTCTTGGGTGGG
GACTTGGATATATAAGTAGGAGCAGATCTGTGTGGTTAGCTCACAGCAACCTGCTGCCATCCATGGAGGTTTGGGCT
ATCTTGGAAGACCTCAGACAGACTAAGCTACTGCTAGAAAACGCCTCGGACGGAGTCTCTGGCCTTTGGAGATTCTG
GTTCGGTGGTGATCTAGCTAGGCTAGTGTTTAGGATAAAACAGGACTACAGGGAAGAATTTGAAAAGTTATTGGACG
ATAGTCCGGGACTTTTTGAAGCTCTTAACTTGGGTCATCAGGCTCATTTTAAGGAGAAGGTTTTATCAGTTTTAGAT
TTTTCTACTCCTGGTAGAACTGCTGCTGCTGTAGCTTTTCTTACTTTTATATTGGATAAATGGATCCGCCAAACTCA
CTTCAGCAAGGGATACGTTTTGGATTTCATAGCAGCAGCTTTGTGGAGAACATGGAAGGCTCGCAGGATGAGGACAA
TCTTAGATTACTGGCCAGTGCAGCCTCTGGGAGTAGCAGGGATACTGAGACACCCACCGACCATGCCAGCGGTTCTG
CAGGAGGAGCAGCAGGAGGACAATCCGAGAGCCGGCCTGGACCCTCCGGTGGAGGAGTAGCTGACCTGTTTCCTGAA
CTGCGACGGGTGCTTACTAGGTCTACGACCAGTGGACAGAACAGGGGAATTAAGAGGGAGAGGAATCCTAGTGGGAA
TAATTCAAGAACCGAGTTGGCTTTAAGTTTAATGAGCCGCAGGCGTCCTGAAACTGTTTGGTGGCATGAGGTTCAGA
GCGAAGGCAGGGATGAAGTTTCAATATTGCAGGAGAAATATTCACTAGAACAACTTAAGACCTGTTGGTTGGAACCT
GAGGATGATTGGGAGGTGGCCATTAGGAATTATGCTAAGATATCTCTGAGGCCTGATAAACAATATAGAATTACTAA
GAAGATTAATATTAGAAATGCATGCTACATATCAGGGAATGGGGCAGAGGTTATAATAGATACACAAGATAAAGCAG
TTTTTAGATGTTGTATGATGGGTATGTGGCCAGGGGTTGTCGGCATGGAAGCAGTAACACTTATGAATATTAGGTTT
AAAGGGGATGGGTATAATGGCATTGTATTTATGGCTAACACTAAGCTGATTCTACATGGTTGTAGCTTTTTTGGGTT
TAATAATACGTGTGTAGAAGCTTGGGGGCAAGTTAGTGTGAGGGGTTGTAGTTTTTATGCATGCTGGATTGCAACAT
CAGGTAGGGTCAAGAGTCAGTTGTCTGTGAAGAAATGCATGTTTGAGAGATGTAATCTTGGCATACTGAATGAAGGT
GAAGCAAGGGTCCGCCACTGCGCAGCTACAGAAACTGGCTGCTTCATTCTAATAAAGGGAAATGCCAGTGTGAAGCA
TAATATGATCTGTGGACATTCGGATGAGAGGCCTTATCAGATGCTGACCTGCGCTGGTGGACATTGCAATATTCTTG
CTACCGTGCATATCGTTTCACATGCACGCAAAAAATGGCCTGTATTTGAACATAATGTGATTACCAAGTGCACCATG
CACATAGGTGGTCGCAGGGGAATGTTTATGCCTTACCAGTGTAACATGAATCATGTGAAGGTAATGTTGGAACCAGA
TGCCTTTTCCAGAGTGAGCTTAACAGGAATCTTTGATATGAATATTCAACTATGGAAGATCCTGAGATATGATGACA
CTAAACCAAGGGTGCGCGCATGCGAATGCGGAGGCAAGCATGCTAGATTCCAGCCGGTGTGCGTGGATGTGACTGAA
GACTTGAGACCCGATCATTTGGTGCTTGCCTGCACTGGAGCGGAGTTCGGTTCTAGTGGTGAAGAAACTGACTAAAG
TGAGTAGTGGGGCAAGATGTGGATGGGGACTTTCAGGTTGGTAAGGTGGGCAGATTGGGTAAATTTTGTTAATTTCT
GTCTTGCAGCTGCCATGAGTGGAAGCGCTTCTTTTGAGGGGGGAGTATTTAGCCCTTATCTGACGGGCAGGCTCCCA
CCATGGGCAGGAGTTCGTCAGAATGTCATGGGATCCACTGTGGATGGGAGACCCGTCCAGCCCGCCAATTCCTCAAC
GCTGACCTATGCCACTTTGAGTTCGTCACCATTGGATGCAGCTGCAGCCGCCGCCGCTACTGCTGCCGCCAACACCA
TCCTTGGAATGGGCTATTATGGAAGCATCGTTGCCAATTCCAGTTCCTCTAATAACCCTTCAACCCTGGCTGAGGAC
AAGCTACTTGTTCTCTTGGCGCAGCTCGAGGCCTTAACCCAACGCTTAGGCGAACTGTCTAAGCAGGTGGCCCAGTT
GCGTGAGCAAACTGAGTCTGCTGTTGCCACAGCAAAGTCTAAATAAAGATCTCAAATCAATAAATAAAGAAATACTT
GATATAAAACAAATGAATGTTTATTTGATTTTTCGCGCGCGGTATGCCCTGGACCATCGGTCTCGATCATTGAGAAC
GCGGTGGATCTTTTCCAGTACCCTGTAAAGGTGGGATTGAATGTTTAGATACATGGGCATTAGTCCGTCTCGGGGGT
GGAGATAGCTCCATTGAAGAGCCTCTTGCTCCGGGGTAGTGTTATAAATCACCCAGTCATAGCAAGGTCGGAGTGCA
TGGTGTTGCACAATATCTTTTAGGAGCAGACTAATTGCAACGGGGAGGCCCTTAGTGTAGGTGTTTACAAATCTGTT
GAGCTGGGACGGGTGCATCCGGGGTGAAATTATATGCATTTTGGACTGGATCTTGAGGTTGGCAATGTTGCCGCCTA
GATCCCGTCTCGGGTTCATATTGTGCAGGACCACCAAGACAGTGTATCCGGTGCACTTGGGAAATTTATCATGCAGC
TTAGAGGGAAAAGCATGAAAAAATTTGGAGACGCCTTTGTGACCCCCCAGATTCTCCATGCACTCATCCATAATGAT
AGCGATGGGGCCGTGGGCAGCGGCACGGGCGAACACGTTCCGGGGGTCTGAAACATCATAGTTATGCTCCTGAGTCA
GGTCATCATAAGCCATTTTAATAAACTTTGGGCGGAGGGTGCCAGATTGGGGGATGAAAGTTCCCTCTGGCCCGGGA
GCATAGTTTCCCTCACATATTTGCATTTCCCAGGCTTTCAGTTCAGAGGGGGGGATCATGTCCACCTGCGGGGCTAT
AAAAAATACCGTTTCTGGAGCCGGGGTGATTAACTGGGACGAGAGCAAATTCCTAAGCAGCTGAGACTTGCCGCACC
CAGTGGGACCGTAAATGACCCCAATTACGGGTTGCAGATGGTAGTTTAGGGAACGACAGCTGCCGTCCTCCCGGAGC
AGGGGGGCCACTTCGTTCATCATTTCCCTTACATGGATATTTTCCCGCACCAAGTCCGTTAGGAGGCGCTCTCCCCC
AAGGGATAGAAGCTCCTGGAGCGAGGAGAAGTTTTTCAGCGGCTTCAGCCCGTCAGCCATGGGCATTTTGGAAAGAG
TCTGTTGCAAGAGCTCGAGCCGGTCCCAGAGCTCGGTGATGTGCTCTATGGCATCTCGATCCAGCAGACCTCCTCGT
TTCGCGGGTTGGGACGGCTCCTGGAGTAGGGAATCAGACGATGGGCGTCCAGCGCTGCCAGGGTCCGATCCTTCCAT
GGTCGCAGCGTCCGAGTCAGGGTTGTTTCCGTCACGGTGAAGGGGTGCGCGCCTGGTTGGGCGCTTGCGAGGGTGCG
CTTCAGACTCATCCTGCTGGTCGAGAACCGCTGCCGATTGGCGCCCTGCATGTCGGCCAGGTAGCAGTTTACCATGA
GTTCGTAGTTGAGCGCCTCGGCCGCGTGGCCTTTGGCACGGAGCTTACCTTTGGAAGTTTTATGGCAGGCGGGGCAG
TAGATACATTTGAGGGCATACAACTTGGGCGCGAGGAAAATGGATTCGGGGGAGTATGCATCCGCACCGCAGGAGGC
GCAGACGGTTTCGCACTCCACGAGCCAGGTCAGATCCGGCTCATCGGGGTCAAAAACAAGTTTTCCGCCATGTTTTT
TGATGCGTTTCTTACCTTTGGTTTCCATGAGTTCGTGTCCCCGCTGGGTGACAAAGAGGCTGTCCGTGTCCCCGTAG
ACCGACTTTATGGGCCTGTCCTCGAGCGGAGTGCCTCGGTCCTCTTCGTAGAGGAACCCAGCCCACTCTGATACAAA
AGCGCGTGTCCAGGCCAGCACAAAGGAGGCCACGTGGGAGGGGTAGCGGTCGTTGTCAACCAGGGGGTCCACCTTCT
CTACGGTATGTAAACACATGTCCCCCTCCTCCACATCCAAGAATGTGATTGGCTTGTAAGTGTAGGCCACGTGACCA
GGGGTCCCCGCCGGGGGGGTATAAAAGGGGGCGGGCCTCTGTTCGTCCTCACTGTCTTCCGGATCGCTGTCCAGGAG
CGCCAGCTGTTGGGGTAGGTATTCCCTCTCGAAGGCGGGCATGACCTCTGCACTCAGGTTGTCAGTTTCTAGGAACG
AGGAGGATTTGATATTGACAGTACCAGCAGAGATGCCTTTCATAAGACTCTCGTCCATCTGGTCAGAAAACACAATC
TTCTTGTTGTCCAGCTTGGTGGCAAATGATCCATAGAGGGCATTGGATAGAAGCTTGGCGATGGAGCGCATGGTTTG
GTTCTTTTCCTTGTCCGCGCGCTCCTTGGCGGTGATGTTAAGCTGGACGTACTCGCGCGCCACACATTTCCATTCAG
GAAAGATGGTTGTCAGTTCATCCGGAACTATTCTGATTCGCCATCCCCTATTGTGCAGGGTTATCAGATCCACACTG
GTGGCCACCTCGCCTCGGAGGGGCTCATTGGTCCAGCAGAGTCGACCTCCTTTTCTTGAACAGAAAGGGGGGAGGGG
GTCTAGCATGAACTCATCAGGGGGGTCCGCATCTATGGTAAATATTCCCGGTAGCAAATCTTTGTCAAAATAGCTGA
TGGTGGCGGGATCATCCAAGGTCATCTGCCATTCTCGAACTGCCAGCGCGCGCTCATAGGGGTTAAGAGGGGTGCCC
CAGGGCATGGGGTGGGTGAGCGCGGAGGCATACATGCCACAGATATCGTAGACATAGAGGGGCTCTTCGAGGATGCC
GATGTAAGTGGGATAACATCGCCCCCCTCTGATGCTTGCTCGCACATAGTCATAGAGTTCATGTGAGGGGGCAAGAA
GACCCGGGCCCAGATTGGTGCGGTTGGGTTTTTCCGCCCTGTAAACGATCTGGCGAAAGATGGCATGGGAATTGGAA
GAGATAGTAGGTCTCTGGAATATGTTAAAATGGGCATGAGGTAAGCCTACAGAGTCCCTTATGAAGTGGGCATATGA
CTCTTGCAGCTTGGCTACCAGCTCGGCGGTGATGAGTACATCCAGGGCACAGTAGTCGAGAGTTTCCTGGATGATGT
CATAACGCGGTTGGCTTTTCTTTTCCCACAGCTCGCGGTTGAGAAGGTATTCTTCGTGATCCTTCCAGTACTCTTCG
AGGGGAAACCCGTCTTTTTCTGCACGGTAAGAGCCCAACATGTAGAACTGATTGACTGCCTTGTAGGGACAGCATCC
CTTCTCCACTGGGAGAGAGTATGCTTGGGCTGCATTGCGCAGCGAGGTATGAGTGAGGGCAAAAGTGTCCCTGACCA
TGACTTTGAGGAATTGATACTTGAAGTCGATGTCATCACAGGCCCCCTGTTCCCAGAGTTGGAAGTCCACCCGCTTC
TTGTAGGCGGGGTTGGGCAAAGCGAAAGTAACATCATTGAAGAGGATCTTGCCGGCCCTGGGCATGAAATTTCGGGT
GATTTTGAAAGGCTGAGGAACCTCTGCTCGGTTATTGATAACCTGAGCGGCCAAGACGATCTCATCAAAGCCATTGA
TGTTGTGCCCCACTATGTACAGTTCTAAGAATCGAGGGGTGCCCCTGACATGAGGCAGCTTCTTGAGTTCTTCAAAA
GTGAGATCTGTAGGGTCAGTGAGAGCATAGTGTTCGAGGGCCCATTCGTGCACGTGAGGGTTCGCTTTAAGGAAGGA
GGACCAGAGGTCCACTGCCAGTGCTGTTTGTAACTGGTCCCGGTACTGACGAAAATGCTGTCCGACTGCCATCTTTT
CTGGGGTGACGCAATAGAAGGTTTGGGGGTCCTGCCGCCAGCGATCCCACTTGAGTTTTATGGCGAGGTCATAGGCG
ATGTTGACGAGCCGCTGGTCTCCAGAGAGTTTCATGACCAGCATGAAGGGGATTAGCTGCTTGCCAAAGGACCCCAT
CCAGGTGTAGGTTTCCACATCGTAGGTGAGAAAGAGCCTTTCTGTGCGAGGATGAGAGCCAATCGGGAAGAACTGGA
TCTCCTGCCACCAGTTGGAGGAATGGCTGTTGATGTGATGGAAGTAGAACTCCCTGCGACGCGCCGAGCATTCATGC
TTGTGCTTGTACAGACGGCCGCAGTACTCGCAGCGATTCACGGGATGCACCTTATGAATGAGTTGTACCTGACTTCC
TTTGACGAGAAATTTCAGTGGAAAATTGAGGCCTGGCGCTTGTACCTCGCGCTTTACTATGTTGTCTGCATCGGCAT
GACCATCTTCTGTCTCGATGGTGGTCATGCTGACGAGCCCTCGCGGGAGGCAAGTCCAGACCTCGGCGCGGCAGGGG
CGGAGCTCGAGGACGAGAGCGCGCAGGCCGGAGCTGTCCAGGGTCCTGAGACGCTGCGGAGTCAGGTTAGTAGGCAG
TGTCAGGAGATTAACTTGCATGATCTTTTGGAGGGCGTGAGGGAGGTTCAGATAGTACTTGATCTCAACGGGTCCGT
TGGTGGAGATGTCGATGGCTTGCAGGGTTCCGTGTCCCTTGGGCGCTACCACCGTGCCCTTGTTTTTCATTTTGGAC
GGCGGTGGCTCTGTTGCTTCTTGCATGTTTAGAAGCGGTGTCGAGGGCGCGCACCGGGCGGCAGGGGCGGCTCGGGA
CCCGGCGGCATGGCTGGCAGTGGTACGTCGGCGCCGCGCGCGGGTAGGTTCTGGTACTGCGCCCTGAGAAGACTCGC
ATGCGCGACGACGCGGCGGTTGACATCCTGGATCTGACGCCTCTGGGTGAAAGCTACCGGCCCCGTGAGCTTGAACC
TGAAAGAGAGTTCAACAGAATCAATCTCGGTATCGTTGACGGCGGCTTGCCTAAGGATTTCTTGCACGTCGCCAGAG
TTGTCCTGGTAGGCGATCTCGGCCATGAACTGCTCGATCTCTTCCTCTTGAAGATCTCCGCGGCCCGCTCTCTCGAC
GGTGGCCGCGAGGTCGTTGGAGATGCGCCCAATGAGTTGAGAGAATGCATTCATGCCCGCCTCGTTCCAGACGCGGC
TGTAGACCACAGCCCCCACGGGATCTCTCGCGCGCATGACCACCTGGGCGAGGTTGAGCTCCACGTGGCGGGTGAAG
ACCGCATAGTTGCATAGGCGCTGGAAAAGGTAGTTGAGTGTGGTGGCGATGTGCTCGGTGACGAAGAAATACATGAT
CCATCGTCTCAGCGGCATCTCGCTGACATCGCCCAGCGCTTCCAAGCGCTCCATGGCCTCGTAGAAGTCCACGGCAA
AGTTAAAAAACTGGGAGTTACGCGCGGACACGGTCAACTCCTCTTCCAGAAGACGGATAAGTTCGGCGATGGTGGTG
CGCACCTCGCGCTCGAAAGCCCCTGGGATTTCTTCCTCAATCTCTTCTTCTTCCACTAACATCTCTTCCTCTTCAGG
TGGGGCTGCAGGAGGAGGGGGAACGCGGCGACGCCGGCGGCGCACGGGCAGACGGTCGATGAATCTTTCAATGACCT
CTCCGCGGCGGCGGCGCATGGTCTCGGTGACGGCACGACCGTTCTCCCTGGGTCTCAGAGTGAAGACGCCTCCGCGC
ATCTCCCTGAAGTGGTGACTGGGAGGCTCTCCGTTGGGCAGGGACACCGCGCTGATTATGCATTTTATCAATTGCCC
CGTAGGTACTCCGCGCAAGGACCTGATCGTCTCAAGATCCACGGGATCTGAAAACCTTTCGACGAAAGCGTCTAACC
AGTCGCAATCGCAAGGTAGGCTGAGCACTGTTTCTTGCGGGCGGGGGCGGCTAGACGCTCGGTCGGGGTTCTCTCTT
TCTTCTCCTTCCTCCTCTTGGGAGGGTGAGACGATGCTGCTGGTGATGAAATTAAAATAGGCAGTTTTGAGACGGCG
GATGGTGGCGAGGAGCACCAGGTCTTTGGGTCCGGCTTGTTGGATACGCAGGCGATGAGCCATTCCCCAAGCATTAT
CCTGACATCTGGCCAGATCTTTATAGTAGTCTTGCATGAGTCGTTCCACGGGCACTTCTTCTTCGCCCGCTCTGCCA
TGCATGCGAGTGATCCCGAACCCGCGCATGGGCTGGACAAGTGCCAGGTCCGCTACAACCCTTTCGGCGAGGATGGC
TTGCTGCACCTGGGTGAGGGTGGCTTGGAAGTCGTCAAAGTCCACGAAGCGGTGGTAGGCCCCGGTGTTGATTGTGT
AGGAGCAGTTGGCCATGACTGACCAGTTGACTGTCTGGTGCCCAGGGCGCACGAGCTCGGTGTACTTGAGGCGCGAG
TATGCGCGGGTGTCAAAGATGTAATCGTTGCAGGTGCGCACCAGGTACTGGTAGCCAATGAGAAAGTGTGGCGGTGG
CTGGCGGTACAGGGGCCATCGCTCTGTAGCCGGGGCTCCGGGGGCGAGGTCTTCCAGCATGAGGCGGTGGTAGCCGT
AGATGTACCTGGACATCCAGGTGATACCGGAGGCGGTGGTGGATGCACGTGGGAACTCGCGCACGCGGTTCCAGATG
TTGCGCAGCGGCATGAAGTAGTTCATGGTAGGCACGGTCTGGCCAGTGAGGCGCGCGCAGTCATTGACGCTCTGTAG
ACACGGAGAAAACGAAAGCGATGAGCGGCTCGACTCCGTGGTCTGGGGGAACGTGAACGGGTTGGGTCGCGGTGTAC
CCCGGTTCGAGTCCAAAGCTAAGCGATCACGCTCGGATCGGCCGGAGCCGCGGCTAACGTGGTATTGGCTATCCCGT
CTCGACCCAGCCGACGAATATCCAGGGTACGGAGTAGAGTCGTTTTTGCTGCTTTTTCCTGGACGTGTGCCATTGCC
ACGTCAAGCTTTAGAACGCTCAGTTCTCGGGCCGTGAGTGGCTCGCGCCCGTAGTCTGGAGAATCAGTCGCCAGGGT
TGCGTTGCGGTATGCCCCGGTTGGAGCCTAAGCGCGGCTCGTATCGGCCGGTTTCCGCGACAAGCGAGGGTTTGGCA
GCCCCGTTATTTCCAAGACCCCGCCAGCCGACTTCTCCAGTTTACGGGAGCGAGCCCTTTTTTTTTTTTTTTTGTTT
TTGTCGCCCAGATGCATCCAGTGCTGCGACAGATGCGCCCCCAGCAACAGGCCCCTTCTCAGCAACAGCCACAAAAG
GCTCTTCTTGCTCCTGCAACTACTGCAGCTGCAGCCGTGAGCGGCGCGGGACAGCCCGCCTATGATCTGGACTTGGA
AGAGGGCGAGGGATTGGCGCGCCTGGGGGCTCCATCGCCCGAGCGGCACCCGCGGGTGCAACTAAAAAAGGACTCTC
GCGAGGCGTACGTGCCCCAGCAGAACCTGTTCAGGGACAGGAGCGGCGAGGAGCCAGAGGAGATGCGAGCATCTCGA
TTTAACGCGGGTCGCGAGCTGCGCCACGGTCTGGATCGAAGACGGGTGCTGCAAGACGAGGATTTTGAGGTCGATGA
AGTCACAGGGATCAGCCCAGCTAGGGCACATGTGGCCGCGGCCAACCTAGTCTCGGCCTACGAGCAGACCGTGAAGG
AGGAGCGCAACTTCCAAAAATCTTTTAACAACCATGTGCGCACCCTGATCGCCCGCGAGGAAGTGACCCTGGGTCTG
ATGCATCTGTGGGACCTGATGGAGGCTATCGCCCAAAACCCCACTAGCAAACCACTGACAGCTCAGCTGTTTCTGGT
GGTTCAACATAGCAGGGACAACGAGGCATTCAGGGAGGCGTTGTTGAACATCACCGAGCCTGATGGGAGATGGCTGT
ATGATCTGATCAACATCCTGCAAAGTATTATAGTGCAGGAACGTAGCCTGGGTTTGGCTGAGAAAGTGGCAGCTATC
AACTACTCGGTCTTGAGCCTGGGCAAATACTACGCTCGCAAGATCTACAAGACCCCCTACGTACCCATAGACAAGGA
GGTGAAGATAGATGGGTTTTACATGCGCATGACTCTGAAGGTGCTGACTCTGAGCGACGATCTGGGGGTGTATCGCA
ATGACAGGATGCACCGCGCGGTGAGCGCCAGCAGGAGGCGCGAGCTGAGCGACAGAGAACTTATGCACAGCTTGCAA
AGAGCTCTAACGGGGGCCGGGACTGATGGGGAGAACTACTTTGACATGGGAGCGGATTTGCAATGGCAACCCAGTCG
CAGGGCCATGGAGGCTGCAGGGTGTGAGCTTCCTTACATAGAAGAGGTGGATGAAGTCGAGGACGAGGAGGGCGAGT
ACTTGGAAGACTGATGGCGCGACCCGTATTTTTGCTAGATGGAACAGCAGCAGGCACCGGACCCCGCAATGCGGGCG
GCGCTGCAGAGCCAGCCGTCCGGCATTAACTCCTCGGACGATTGGACCCAGGCCATGCAACGCATAATGGCGCTGAC
GACCCGCAACCCCGAAGCCTTTAGACAGCAACCCCAGGCCAACCGCCTTTCTGCCATACTGGAGGCCGTAGTGCCCT
CCCGCTCCAACCCCACCCACGAGAAGGTCCTGGCTATCGTGAACGCGCTGGTGGAGAACAAGGCCATCCGTCCCGAT
GAGGCCGGGCTGGTATACAATGCTCTCTTGGAGCGCGTGGCCCGTTACAACAGCAGCAACGTGCAAACCAACCTGGA
CCGGATGGTGACCGATGTGCGCGAGGCCGTGTCTCAGCGCGAGCGATTCCAGCGCGACGCCAACTTGGGGTCGTTGG
TAGCGCTAAACGCTTTCCTCAGCACCCAGCCCGCCAACGTGCCCCGTGGTCAGCAAGACTATACAAACTTTTTGAGT
GCATTGAGACTCATGGTAGCTGAGGTGCCCCAGAGCGAGGTGTACCAGTCCGGGCCAGATTACTTCTTCCAGACCAG
CAGACAGGGCTTGCAGACAGTGAACCTGACTCAGGCTTTCAAGAACCTGAAGGGTCTGTGGGGAGTGCACGCCCCAG
TAGGGGATCGCGCGACCGTGTCTAGCTTGCTGACTCCCAACTCCCGCCTGCTGCTGCTGCTGGTATCCCCCTTTACT
GACAGCGGTAGCATTGACCGCAACTCGTACTTGGGCTACCTGCTTAACCTGTATCGCGAGGCCATAGGACAGAGCCA
GGTGGACGAGCAGACCTATCAAGAAATCACCCAAGTGAGCCGCGCCCTGGGTCAGGAAGACACGGGCAGTTTGGAAG
CCACCCTGAACTTCTTGCTAACCAACCGGTCACAGAAGATCCCTCCTCAGTATGCGCTTACCGCTGAGGAGGAGCGG
ATCCTCAGATACGTGCAACAGAGCGTTGGACTGTTCCTGATGCAGGAGGGGGCGACACCTACCGCCGCGCTGGACAT
GACAGCTCGAAACATGGAGCCCAGCATGTATGCTAGTAACAGGCCTTTCATTAACAAACTGCTGGACTACCTGCACA
GGGCGGCCGCCATGAACTCTGATTATTTCACCAATGCTATCCTGAACCCACACTGGCTGCCCCCACCTGGTTTCTAC
ACTGGCGAGTACGACATGCCCGACCCCAATGACGGGTTCCTGTGGGACGATGTGGACAGCAGCATATTTTCCCCGCC
TCCCGGTTATACAGTTTGGAAGAAGGAAGGGGGCGATAGAAGACACTCTTCCGTGTCGCTATCCGGAACGGCTGGTG
CTGCCGCGACCGTGCCCGAAGCTGCAAGTCCTTTCCCTAGCTTGCCCTTTTCACTAAACAGCGTTCGCAGCAGTGAA
CTGGGGAGAATAACCCGCCCGCGCTTGATGGGCGAGGATGAGTACTTGAATGACTCTTTGCTGAGGCCAGAGAGGGA
AAAGAACTTCCCCAACAATGGAATAGAGAGTCTGGTGGATAAGATGAGTAGATGGAAGACCTATGCGCAGGATCACA
GAGACGAGCCCAGGATCTTGGGGGCTACAAGCAGACCGATCCGTAGACGCCAGCGCCACGACAGGCAGATGGGTCTT
GTGTGGGACGATGAGGACTCTGCCGATGATAGCAGCGTGTTGGACTTGGGTGGAAGAGGAGGGGGCAACCCGTTCGC
TCATCTGCGTCCCAGATTCGGGCGCATGTTGTAAAAGTGAAAGTAAAATAAAAAGGCAACTCACCAAGGCCATGGCG
ACCGAGCGTGCGTTCGTTCTTTTTTGTTATCTGTGTCTAGTACGATGAGGAGACGAGCCGTGCTAGGCGGAGCGGTG
GTGTATCCGGAGGGTCCTCCTCCTTCTTACGAGAGCGTGATGCAGCAACAGGCGGCGATGATACAGCCCCCACTGGA
GGCTCCCTTCGTACCCCCACGGTACCTGGCGCCTACGGAAGGGAGAAACAGCATTCGTTACTCGGAGCTGTCGCCCC
TGTACGATACCACCAAGTTGTATCTGGTGGACAACAAGTCGGCGGACATCGCCTCCCTGAACTATCAGAACGACCAC
AGCAACTTCCTGACCACGGTGGTGCAGAACAATGACTTTACCCCCACGGAGGCTAGCACCCAGACCATCAACTTTGA
CGAGCGGTCGCGATGGGGCGGTCAGCTGAAGACCATCATGCACACCAACATGCCCAACGTGAACGAGTACATGTTCA
GCAACAAGTTCAAGGCGAGGGTGATGGTGTCCAGAAAAGCTCCTGAAGGTGTTACAGTAAATGACACCTATGATCAT
AAAGAGGATATCTTGAAGTATGAGTGGTTTGAGTTCATTTTACCAGAAGGCAACTTTTCAGCCACCATGACGATCGA
CCTGATGAACAATGCCATCATTGACAACTACCTGGAAATTGGCAGACAGAATGGAGTGCTGGAAAGTGACATTGGTG
TTAAGTTTGACACTAGAAATTTCAGGCTCGGGTGGGACCCCGAAACTAAGTTGATTATGCCAGGTGTCTACACTTAT
GAGGCATTCCATCCTGACATTGTATTGCTGCCTGGTTGCGGGGTAGACTTTACTGAAAGCCGACTTAGCAACTTGCT
TGGCATCAGGAAGAGACATCCATTCCAGGAGGGTTTCAAAATCATGTATGAAGATCTTGAAGGGGGTAATATTCCTG
CCCTTTTGGATGTCACTGCCTATGAGGAAAGCAAAAAGGATACCACTACTGAAACAACCACACTGGCTGTTGCAGAG
GAAACTAGTGAAGATGATGATATAACTAGAGGAGATACCTATATAACTGAAAAACAAAAACGTGAAGCTGCAGCTGC
TGAAGTTAAAAAAGAGTTAAAGATCCAACCTCTAGAAAAAGACAGCAAGAGTAGAAGCTACAATGTCTTGGAAGACA
AAATCAACACAGCCTACCGCAGTTGGTACCTGTCCTACAATTACGGTAACCCTGAGAAAGGAATAAGGTCTTGGACA
CTGCTCACCACTTCAGATGTCACCTGTGGGGCAGAGCAGGTCTACTGGTCGCTCCCTGACATGATGCAAGACCCAGT
CACCTTCCGCTCCACAAGACAAGTCAACAACTACCCAGTGGTGGGTGCAGAGCTTATGCCCGTCTTCTCAAAGAGTT
TCTACAATGAGCAAGCCGTGTACTCTCAGCAGCTCCGACAGGCCACTTCGCTCACGCACGTCTTCAACCGCTTCCCT
GAGAACCAGATCCTCATCCGCCCGCCGGCGCCCACAATTACCACCGTCAGTGAAAACGTTCCTGCTCTCACAGATCA
CGGGACCCTGCCGTTACGCAGCAGTATCCGGGGAGTCCAGCGCGTGACCGTTACTGACGCCAGACGCCGCACCTGTC
CCTACGTTTACAAGGCCCTGGGCATAGTCGCGCCGCGCGTTCTTTCAAGCCGCACTTTCTAAAAAAAAAAAAAATGT
CCATTCTCATCTCGCCCAGTAATAATACCGGTTGGGGACTGTATGCGCCCACCAAGATGTATGGAGGCGCCCGCAAG
CGCTCTACCCAGCATCCTGTGCGCGTTCGCGGTCATTTCCGCGCTCCCTGGGGCGCACTCAAGGGTCGTACCCGCAC
TCGGACCACGGTCGATGATGTGATCGACCAGGTGGTCGCCGATGCTCGTAATTATACTCCTACTGCGCCTACATCTA
CTGTGGATGCAGTTATTGACAGTGTGGTGGCAGACGCCCGCGCCTATGCTCGCCGGAAGAGCCGAAGGAGGCGCATC
GCCAGGCGCCACAGGGCTACTCCCGCCATGCGAGCCGCAAAAGCTATTCTGCGGAGGGCCAAACGTGTGGGGCGAAG
AGCCATGCTTAGAGCGGCCAGACGCGCGGCTTCAGGTGCCAGCAGCGGCAGGTCCCGCAGGCGCGCGGCCACGGCGG
CAGCAGCGGCCATTGCCAACATGGCCCAACCGCGAAGAGGCAATGTGTACTGGGTGCGTGATGCCACTACCGGCCAG
CGCGTGCCCGTGCGCACCCGCCCCCCTCGCACTTAGAAGATACTGAGCAGTCTCCGATGTTGTGTCCCAGCGGCAAG
TATGTCCAAGCGCAAATACAAGGAAGAGATGCTCCAGGTCATCGCGCCTGAAATCTACGGTCCGCCGGTGAAGGATG
AAAAAAAGCCCCGCAAAATCAAGCGGGTCAAAAATAACAAAAAGGAAGAAGATGACGATGATGGGCTGGTGGAGTTT
GTGCGCGAGTTCGCCCCAAGACGGCGCGTGCAGTGGCGCGGGCGCAAAGTGCGTCAAGTGCTCAGACCCGGGACCAC
TGTGGTTTTTACACCTGGCGAGCGTTCCAGCACTACTTTTAAACGGTCCTATGATGAGGTGTACGGGGATGACGATA
TTCTTGAGCAGGCGGCAGACCGCCTTGACGAGTTTGCTTATGGCAAGCGCACTAGATCCAGTCCCAAAGAGGAGGCT
GTGTCCATTCCTTTGGATCATGGAAATCCCACCCCCAGCCTCAAACCAGTCACCCTGCAGCAAGTGCTGCCCGTGCC
TGCGCGGAGAGGCGTAAAGCGCGAGGGTGAGGACCTATATCCCACCATGCAGCTAATGGTGCCCAAGCGCCAGAGGC
TAGAAGACGTACTGGAGAAAATGAAAGTGGATGCCGATATCCAGCCTGAGGTCAAAGTAAGACCTATCAAGGAAGTG
GCGCCAGGTTTGGGAGTACAAACCTTCGACATCAAGATTCCCACCGAGTCCATGGAAGTGCAGACCGAACCTGCAAA
ACCCACCACCTCAATTGAGGTGCAAACGGAACCCTGGATGCCCGCGCCCGTTGCCGCCCCCAGCACCACTCGAAGAT
CACGACGAAAGTACGGCCCAGCAAGTCTGCTAATGCCCAACTATGCTCTGCACCCATCCATCATTCCCACTCCGGGT
TACAGAGGCACTCGCTACTATCGAAACCGGAGCAACACCTCTCGCCGCCGCAAACCACCTGCAAGTCGCACTCGCCG
TCGCCGCCGCCGCAACACTGCCAGCAAATTGACTCCCGCCGCCCTGGTGCGGAGAGTGTACCGCGATGGTCGCGCTG
AACCTCTGACGCTGCCGCGCGCGCGCTACCATCCAAGCATCACCACTTAATGACTGTTGACGCTGCCTCCTTGCAGA
TATGGCCCTCACTTGCCGCCTTCGCGTCCCCATTACTGGCTACCGAGGAAGAAACTCGCGCCGTAGAAGGATGTTGG
GGCGAGGGATGCGCCGCCACAGACGAAGGCGCGCTATCAGCAGACGATTAGGGGGTGGCTTTTTGCCAGCTCTTATA
CCCATCATCGCCGCAGCGATCGGGGCGATACCAGGCATAGCTTCAGTGGCGGTTCAGGCCTCGCAGCGCCACTAACA
TTGGAAAAAACTTATAAATAAAAAATAGAATGGACTCTGACGCTCCTGGTCCTGTGACTATGTTTTTGTAGAGATGG
AAGACATCAATTTTTCATCCCTGGCTCCGCGACACGGCACGAGGCCGTACATGGGCACCTGGAGCGACATCGGCACG
AGCCAACTGAACGGGGGCGCCTTCAATTGGAGCAGTATCTGGAGCGGGCTTAAAAATTTTGGCTCGACCGTAAAAAC
CTATGGGAACAAAGCTTGGAACAGCAGCACAGGGCAGGCTCTGAGAAATAAGCTTAAGGAACAAAACTTCCAACAGA
AGGTGGTCGATGGGATCGCCTCTGGTATTAACGGCGTAGTGGATCTGGCCAACCAGGCTGTACAAAAACAGATAAAC
AGCCGCCTGGACCCGCCGCCCGCAACCCCTGGTGAAATGGAAGTGGAGGAAGAACTTCCTCCGCTGGAAAAGCGGGG
CGACAAGCGTCCGCGACCCGAGCTAGAGCAGACGCTGGTGACGCGCGCAGACGAGCCCCCTTCATATGAGGAGGCAG
TAAAGCTCGGAATGCCCACTACCAGGCCTGTAGCTCACATGGCTACCGGGGTGATGAAACCTTCTCAGTCACATCGA
CCCGCCACCTTGGACTTGCCTCCTCCCCCTGCTTCTGCGGCGCCTGTTCCCAAACCTGTCGCTACCAGAAAGCCCAC
CGCCGTACAGCCCGTCGCCGTAGCCAGACCGCGTCCTGGGGGCACACCGCGCCCGAAAGCAAACTGGCAAAGTACTC
TGAACAGCATCGTGGGTCTGGGCGTGCAGAGTGTAAAGCGCCGTCGCTGCTATTAATTAAATATGGAGTAGCGCTTA
ACTTGCTTGTCTGTGTGTATGTATCATCACCACGCCGCCGCAGCAGAGGAGAAAGGAAGAGGTCGCGCGCCGAGGCT
GAGTTGCTTTCAAGATGGCCACCCCATCGATGATGCCCCAATGGGCATACATGCACATCGCCGGACAGGATGCTTCG
GAGTACCTCAGTCCGGGTCTGGTGCAGTTCGCCCGTGCAACAGACACCTACTTCAGTATGGGGAACAAATTTAGAAA
CCCCACAGTGGCGCCCACCCACGATGTGACCACCGACCGTAGCCAGCGCCTGATGCTGCGCTTCGTGCCCGTTGACC
GGGAAGACAATACCTACTCTTACAAAGTTCGCTACACGCTGGCTGTAGGCGACAACAGAGTGCTTGACATGGCCAGC
ACATTCTTTGACATTCGGGGGGTGCTTGATAGAGGTCCTAGCTTCAAGCCATATTCCGGCACAGCTTACAATTCACT
CGCTCCTAAGGGCGCGCCCAATACATCTCAGTGGATAGTTACAACAAATGGGGACAATGCAGTAACTACCACCACAA
ACACATTTGGCATTGCTTCCATGAAGGGAGACAATATTACTAAAGAAGGTTTGCAAATTGGGAAAGACATTACCACT
ACTGAAGGAGAAGAAAAGCCCATTTATGCCGATAAAACATATCAGCCAGAGCCTCAAGTTGGAGAAGAATCATGGAC
TGATACTGATGGAACAAATGAAAAGTTTGGTGGAAGAGCCCTTAAACCAGCTACCAACATGAAGCCATGCTACGGGT
CTTTTGCAAGACCTACAAACATAAAAGGGGGCCAAGCTAAAAACAGAAAAGTAAAACCAACAACCGAAGGAGGGGTT
GAAACTGAGGAACCAGATATTGATATGGAATTTTTCGATGGTAGAGATGCTGTTGCAGGAGCTTTAGCGCCTGAAAT
TGTGCTTTATACGGAAAATGTAAATTTGGAAACTCCAGACAGTCATGTGGTATATAAACCAGAAACGTCTAATAACT
CTCATGCAAATTTGGGTCAACAAGCCATGCCTAACAGACCCAATTACATTGGCTTCAGGGATAACTTCGTAGGCCTA
ATGTACTACAACAGTACTGGAAATATGGGAGTTTTGGCTGGCCAAGCATCACAACTGAATGCAGTGGTTGACTTGCA
GGACAGAAATACTGAACTGTCATATCAGCTTTTGCTTGATTCTCTGGGAGACAGAACCAGATACTTCAGCATGTGGA
ATCAGGCTGTGGACAGTTACGATCCCGATGTTCGCATTATTGAAAATCATGGCATCGAGGATGAACTGCCTAATTAC
TGTTTTCCTCTGAATGGCATAGGACCAGGGCACACATATCAAGGCATTAAAGTTAAAACCGATGACACTAATGGATG
GGAAAAAGATGCTAATGTTGCTCCAGCTAATGAAATAACCATAGGCAACAACCTGGCTATGGAAATTAATATCCAAG
CTAACCTTTGGAGAAGTTTTCTGTACTCTAATGTGGCTTTGTACCTTCCAGATGTTTACAAGTACACGCCACCTAAC
ATTACTTTGCCCACTAACACCAACACCTATGAGTACATGAACGGGCGAGTGGTATCCCCATCCCTGGTTGATTCATA
CATCAACATTGGCGCCAGGTGGTCTCTTGACCCAATGGACAATGTGAATCCATTCAACCACCACCGCAATGCTGGTC
TGCGCTACAGGTCCATGCTTCTGGGAAATGGTCGTTATGTGCCTTTCCACATACAAGTGCCTCAGAAATTCTTTGCT
GTCAAGAACCTACTTCTTCTACCTGGCTCCTACACCTACGAGTGGAACTTCCGAAAGGATGTGAACATGGTCCTGCA
AAGTTCCCTTGGAAATGACCTCAGAACGGATGGTGCTACCATAAGTTTCACCAGCATCAATCTCTATGCCACCTTCT
TCCCCATGGCTCACAACACAGCTTCCACCCTTGAAGCCATGCTGCGCAACGATACCAATGATCAGTCATTTAACGAC
TACCTCTCTGCAGCTAACATGCTTTACCCCATTCCTGCCAATGCAACCAACATTCCAATTTCCATCCCATCTCGCAA
CTGGGCAGCCTTCAGGGGCTGGTCCTTCACCAGACTCAAAACCAAGGAGACTCCATCTCTTGGATCAGGGTTCGATC
CCTACTTCGTATATTCTGGATCTATTCCCTACCTGGATGGCACCTTTTACCTTAACCACACTTTCAAGAAGGTCTCC
ATCATGTTTGACTCCTCAGTCAGCTGGCCTGGCAATGACAGGCTGTTGAGTCCAAATGAGTTTGAAATCAAGCGCAC
TGTGGACGGGGAAGGATACAACGTGGCACAATGCAACATGACCAAAGACTGGTTCCTGGTTCAGATGCTTGCCAATT
ACAACATTGGCTACCAGGGCTTTTACATCCCTGAGGGATACAAGGATCGCATGTACTCCTTTTTCAGAAACTTCCAG
CCTATGAGCAGGCAGGTGGTTGATGAGGTTAATTACACTGACTACAAAGCCGTCACCTTACCATACCAACACAACAA
CTCTGGCTTTGTAGGGTACCTTGCACCTACTATGAGACAAGGGGAACCTTACCCAGCCAATTATCCATACCCGCTCA
TCGGAACTACTGCCGTTAAGAGTGTCACCCAGAAAAAGTTCCTGTGCGACAGGACCATGTGGCGCATTCCCTTCTCC
AGCAACTTCATGTCCATGGGGGCCCTTACCGACCTGGGACAGAACATGCTCTATGCCAACTCAGCCCATGCGCTGGA
CATGACTTTTGAGGTGGATCCCATGGATGAGCCCACCCTGCTTTATCTTCTTTTCGAAGTCTTCGACGTGGTCAGAG
TGCACCAGCCACACCGCGGCGTCATCGAGGCCGTCTACCTGCGCACACCGTTCTCGGCCGGCAACGCCACCACATAA
GAAGCCTCTTGCTTCTTGCAAGCAGCAGCTGCAGCCATGACATGCGGGTCCGGAAACGGCTCCAGCGAGCAAGAGCT
CAAAGCCATCGTCCGAGACCTGGGCTGCGGACCCTATTTCCTGGGAACCTTTGACAAGCGTTTCCCGGGGTTCATGG
CCCCCGACAAGCTCGCCTGCGCCATAGTCAACACTGCCGGACGCGAGACGGGGGGAGAGCACTGGCTGGCTTTTGGT
TGGAACCCGCGCTACAACACCTGCTACCTTTTTGATCCTTTTGGGTTCTCGGATGAGCGGCTCAAACAGATTTACCA
GTTTGAGTACGAGGGGCTCCTGCGTCGCAGTGCCCTTGCTACCAAAGACCGCTGCATCACCCTGGAGAAGTCTACCC
AAAGCGTGCAGGGTCCGCGCTCAGCCGCCTGTGGACTTTTTTGCTGTATGTTCCTTCATGCCTTTGTGCACTGGCCC
GACCGCCCCATGGACGGAAACCCCACCATGAAGTTGCTGACTGGGGTGTCCAACAGCATGCTCCAATCACCCCAAGT
CCAGCCCACCCTGCGCCGCAACCAGGAGGTGCTATACCGCTTCCTAAACACCCACTCATCTTACTTTCGTTCTCACC
GCGCGCGCATTGAAAGGGCCACCGCGTTTGACCGTATGGATATGCAATAAGTCATGTAAAACCGTGTTCAATAAACA
GCACTTTATTTTTACATGCACTGAGGCTCTGGTTTTGCTCATTTGTTTCATCATTTACTCAGAAGTCGAATGGGTTC
TGGCGGGAGTCAGAGTGACCCGCGGGCAGGGATACGTTGCGGAACTGTAACCTGTTCTGCCACTTGAACTCGGGGAT
TACCAGCTTGGGAACTGGAATCTCGGGAAAGGTGTCTTGCCACAACTTTCTGGTCAGTTGCATAGCGCCAAGCAGGT
CAGGAGCAGAGATCTTGAAATCACAGTTGGGGCCGGCATTCTGGACACGGGAGTTGCGATACACTGGGTTGCAACAC
TGGAACACTATCAACGCTGGGTGTCTTACGCTTGCCAACACGGTTGGGTCACTGATGGTAGTCACATCCAAGTCTTC
AGCATTGGCCATCCCAAAGGGGGTCATCTTACATGTCTGCCTGCCCATCACGGGAGCGCAGCCTGGCTTGTGGTTGC
AATCACAATGAATGGGGATCAGCATCATCCTGGCTTGGTCGGGAGTTATCCCTGGGTACACAGCCTTCATGAAGGCT
TCGTACTGCTTAAAAGCTTCCTGGGCCTTACTTCCCTCGGTGTAGAACATCCCACAGGACTTGCTGGAAAATTGATT
AGTAGTACAGTTGGCATCATTCACACAACAGCGGGCATCGTTGTTGGCCAACTGAACCACATTTCTGCCCCAGCGGT
TTTGGGTGATCTTGGCTCTGTCTGGATTCTCCTTCATAGCGCGCTGCCCGTTCTCGCTCGCCACATCCATCTCGATA
ATGTGGTCCTTCTGGATCATGATAGTGCCATGCAGGCATTTCACCTTGCCTTCATAATCGGTGCATCCATGAGCCCA
CAGAGCGCACCCGGTGCACTCCCAATTATTGTGGGCGATCTCAGAATAATAATGTACCAATCCCTGCATGAATCTTC
CCATCATTGTTGTCAAGGTCTTCATGCTGGTAAATGTCAGCGGGATGCCACGGTGCTCCTCGTTCACATACTGGTGG
CAGATACGCTTGTATTGCTCGTGCTGCTCTGGCATCAGCTTGAAAGAGGTTCTCAGATCATTATCCAGCCTGTACCT
TTCCATTAGCACAGCCATCACTTCCATGCCCTTCTCCCAGGCAGATACCAGGGGCAGACTCAAAGGATTCCTAACAG
CAATAAAAGTAGCTCCTTTAGCTATAGGGTCATTCTTGTCGATCTTCTCAACACTTCTCTTGCCATCCTTCTCAATG
ATGCGCACCGGGGGGTAGCTGAAGCCCACGGCCACCAACTGAGCCTGTTCTCTTTCTTCTTCACTATCCTGGCTGAT
GTCTTGCAGAGGGACATGCTTGGTCTTCCTGGGCTTCTTCTTGGGAGGGATCGGGGGAGGACTGTTGCTCCGCTCCG
GAGACAGGGATGACTGCGAAGTTTCGCTTACCAATACCACCTGGCTCTCGGTAGAAGAACCGGACCCCACACGACGG
TAGGTGTTCCTCTTCGGGGGCAGAGGTGGAGGCGACTGAGATGGGCTGCGGTCTGGCCTTGGAGGCGGATGGCTGGC
AGAGCTCATTCCGCGTTCGGGGGTGTGCTCCCGGTGGCGGTCGCTTGACTGATTTCCTCCGCGGCTGGCCATTGTGT
TCTCCTAGGCAGAGAAACAACAGACATGGAAACTCAGCCATCACTGCCAACATCGCTGCAAGCACCATCACACCTCG
CCCCCAGCAGCGACGAGGAGGAGAGCTTAACCACCCCACCACCCAGTCCCGCTACCACCACCTCTACCCTCGATGAT
GAGGAGGAGGTCGACGCAGCCCAGGAGATGCAGGCGCAGGATAATGTGAAAACGGAAGAGATTGAGGCAGATGTCGA
GCAGGACCCGGGCTATGTGACGCCGGCGGAGCACCAGGAGGAGCTGAAACGCTTTCTAGACAGAGAGGATGACGACC
GCCCAGAGCATCAAGCAGATGGCGTTTACCAGGAGGCTGGGATCAGGGATCATGTCGCCGACTACCTCACCGGCCTT
GGTGGGGAGGACGTGCTCCTCAAACATCTAGCAAGGCAGTCGATCATAGTTAAAGACGCATTGCTCGATCTCACTGA
AGTGCCCATCAGTGTGGAAGAGCTTAGCCGCGCCTACGAGCTGAACCTCTTTTCGCCTCAGGTACCCCCCAAGCGGC
AGCCAAACGGCACCTGCGAGGCCAACCCTCGACTCAACTTCTATCCAGCTTTTACTATCCCCGAAGTGTTGGCCACC
TACCACATCTTTTTCAAGAACCAAAAGATTCCAGTCTCCTGCCGCGCCAACCGCACCCGCGCCGATGCCCTGCTCAA
CTTGGGTCCGGGAGCTCGCTTACCTGATATAGCTTCCTTGGAAGAGGTTCCAAAGATCTTTGAGGGTCTGGGAAGTG
ATGAGACACGGGCCGCAAATGCTCTGCAACAGGGAGAGAATGACATGGATGAACACCACAGCGCTCTGGTGGAACTG
GAGGGTGACAATGCCCGGATTGCAGTGCTCAAGCGCAGTATCGTGGTCACCCATTTTGCCTACCCCGCTGTTAACCT
GCCCCCCAAAGTTATGAGCGCTGTCATGGACCATCTGCTCATCAAACGAGCAAGACCTCTTTCAGAAAACCAGAACA
TGCAGGATCCAGACGCCTCGGACGAGGGCAAGCCGGTAGTCAGTGACGAGCAGCTATCTCGCTGGCTGGGTACCAAC
TCCCCCCGAGATTTGGAAGAGAGGCGCAAGCTTATGATGGCTGTAGTGCTAGTAACTGTGGAGCTGGAGTGTCTGCG
CCGCTTTTTCACCGACCCTGAGACCCTGCGCAAGCTAGAGGAGAACCTGCACTACACCTTTAGACATGGCTTCGTGC
GGCAGGCATGCAAGATCTCCAACGTGGAGCTTACCAACCTGGTTTCTTACATGGGCATTTTGCATGAGAACCGACTA
GGGCAGAGCGTCCTGCACACCACCCTTAAAGGGGAGGCCCGCCGTGACTACATCCGAGACTGTGTCTACCTCTACCT
CTGCCATACCTGGCAAACTGGTATGGGTGTGTGGCAACAGTGTTTGGAAGAGCAGAACCTAAAAGAGCTGGACAAGC
TCTTGCAGAGATCCCTCAAAGCCCTGTGGACAGGTTTTGATGAGCGCACCGTCGCCTCGGACCTGGCAGACATCATC
TTCCCCGAGCGTCTCAGGGTTACTCTGCGAAACGGCCTGCCAGACTTTATGAGCCAGAGCATGCTTAACAACTTTCG
CTCTTTCATCCTGGAACGCTCCGGTATCCTGCCTGCCACCTGCTGTGCGCTGCCCTCCGACTTTGTGCCTCTCACCT
ACCGCGAGTGCCCACCGCCGCTATGGAGCCACTGCTACCTGTTCCGCCTGGCCAACTACCTCTCCTACCACTCGGAT
GTTATAGAGGATGTGAGCGGAGACGGCCTGCTGGAATGCCACTGCCGCTGCAATCTTTGCACACCCCACCGCTCCCT
TGCCTGCAACCCCCAGTTGCTGAGCGAGACCCAGATTATCGGCACCTTCGAGCTGCAGGGTCCCAGAAGTAAAGGCG
AGGGGTCTTCTCCGGGGCAGAGTTTGAAACTGACACCGGGGCTGTGGACCTCCGCCTACCTGCGCAAGTTTCACCCC
GAGGACTACCATCCCTATGAGATCAGGTTCTATGAGGACCAATCACATCCTCCCAAAGTCGAGCTCTCAGCCTGCGT
CATCACCCAGGGAGCAATTCTGGCCCAATTGCAAGCCATCCAAAAATCTCGCCAAGAATTTCTGCTAAAAAAGGGAA
ACGGGGTCTACCTTGACCCTCAGACCGGTGAGGAGCTCAACACAAGGTTCCCCCAGGATGTCCCATCGCCGAGGAAG
CAAGAAGTTGAAGGTGCAGCTGTCGCCCCCAGAGGATATGAAGGAAGACTGGGACAGTCAGGCAGAGGAGGAGATGG
AAGATTGGGACAGCCAGGCAGAGGAGGTGGACAGCCTGGAGGAAGACAGTTTGGAGGAGGAAGACGAGGAGGCAGAG
GAGGTGGAAGAAGCAACCGCCGCCAAACAGTTGTCATCGGCGGCGGAGACAAGCAAGTCCCCAGACAGCAGCACGGC
TACCATCTCCGCTCCGGGTCGGGGGGCCCAGCGGCGGCCCAACAGTAGATGGGACGAGACCGGGCGATTCCCAAACC
CGACCACCGCTTCCAAGACCGGTAAGAAGGAGCGACAGGGATACAAGTCCTGGCGTGGACATAAAAACGCTATCATC
TCCTGCTTGCATGAATGCGGGGGCAACATATCCTTCACCCGGCGATACCTGCTCTTCCACCACGGTGTAAACTTCCC
CCGCAATATCTTGCATTACTACCGTCACCTCCACAGCCCCTACTGCAGTCAGCAAGTCCCGGCAACCCCGACAGAAA
AATACAGCAGCGACAACGGTGACCAGAAAACCAGCAGTTAGAAAATCCACAACAAGTGCACCAGGAGGAGGACTGAG
GATCACAGCGAACGAGCCAGCGCAGACCAGAGAGCTGAGGAACCGGATCTTTCCAACCCTCTATGCCATTTTCCAGC
AGAGTCGGGGGCAAGAGCAGGAACTGAAAGTAAAAAACCGATCTCTGCGCTCGCTCACCAGAAGTTGTTTGTATCAC
AAGAGCGAAGACCAACTTCAGCGCACTCTCGAGGACGCCGAGGCTCTCTTCAACAAGTACTGCGCGCTGACTCTTAA
AGAGTAGCCCTTGCCCGCGCTCATTTTGAAAACGGCGGGAATCACGTCACCCTTGGCACCTGTCCTTTGCCCTTGTC
ATGAGTAAAGAGATTCCCACGCCTTACATGTGGAGCTATCAGCCCCAAATGGGGTTGGCAGCAGGCGCTTCCCAGGA
CTACTCCACCCGCATGAATTGGCTTAGCGCCGGGCCCTCAATGATATCACGGGTTAATGATATACGAGCTTATCGAA
ACCAGTTACTCCTAGAACAGTCAGCTCTCACCACCACACCCCGTCAACACCTTAATCCCCGAAATTGGCCCGCCACC
CTGGTGTACCAGGAAAATCCCGCTCCCACCACCGTACTACTTCCTCGAGACGCCCAGGCCGAAGTTCAGATGACTAA
CGCAGGTGTACAGCTGGCGGGCGGTTCCGCCCTATGTCGTCACCGACCTCAACAGAGTATAAAACGCCTGGTGATTA
GAGGCCGAGGTATCCAGCTCAACGACGAGTCGGTTAGCTCTTCGCTTGGTCTGCGACCAGACGGAGTCTTCCAAATC
GCCGGCTGTGGGAGATCTTCCTTCACTCCTCGTCAGGCTGTGCTGACTTTGGAGAGTTCGTCCTCGCAGCCCCGCTC
GGGCGGCATTGGAACTCTCCAGTTTGTGGAGGAGTTTACTCCCTCTGTCTACTTCAACCCCTTCTCCGGCTCTCCTG
GCCAGTACCCGGACGAGTTCATACCAAACTTCGACGCAATCAGCGAGTCAGTGGATGGCTATGATTGATGTCTAATG
GTGGTGCGGCTGAGCTAGCTCGACTGCGACACCTAGACCACTGCCGCCGCTTTCGCTGCTTCGCCCGGGAACTCACC
GAGTTCATCTACTTCGAACTCTCCGAGGAGCACCCTCAGGGTCCGGCCCACGGAGTGCGGATTACCATCGAAGGGGG
AATAGACTCTCGCCTGCATCGCATCTTCTCCCAGCGGCCCGTGCTAATTGAACGCGACCAGGGAAATACAACCATCT
CCATCTACTGCATCTGTAACCACCCCGGATTGCATGAAAGCCTTTGCTGTCTTGTTTGTGCTGAGTTTAATAAAAAC
TGAGTTAAGACCCTCCTACGGACTACCGCTTCTTCAATCAGGACTTTACAACACCAACCAGATCTTCCAGAAGACCC
AGACCCTTCCTCCTTTCATCCAGGACTCTAACTCTACCTTACCAGCACCCTCCACTACTAACCTTCCCGAAACAAAC
AAGCTTGCATCTCATCTGCAACACCGCCTTTCACGAAGCCTTCTTTCTGCCAATACTACCACTCCCAAAACCGGAGG
TGAGCTCCGCGGTCTTCCTACTGACGACCCCTGGGTGGTAGCGGGTTTTGTAACGTTAGGAGTAGTTGCGGGTGGGC
TTGTGCTGATCCTTTGCTACCTATACACACCTTGCTGTGCATATTTAGTCATATTGTGCTGTTGGTTTAAGAAATGG
GGGCCATACTAGTCGTGCTTGCTTTACTTTCGCTTTTGGGTCTGGGCTCTGCTAATCTCAATCCTCTCGATCACGAT
CCATGTTTAGACTTCGACCCAGAAAACTGCACACTTACTTTTGCACCCGACACAAGCCGTCTCTGTGGAGTTCTTAT
TAAGTGCGGATGGGACTGCAGGTCCGTTGAAATTACACATAATAACAAAACATGGAACAATACCTTATCCACCACAT
GGGAGCCAGGAGTTCCCCAGTGGTATACTGTCTCTGTCCGAGGTCCTGACGGTTCCATCCGCATTAGTAACAACACT
TTCATTTTTTCTGAAATGTGCGATCTGGCCATGTTCATGAGCAGACAGTATGACCTATGGCCTCCCAGCAAAGAGAA
CATTGTGGCATTTTCCATTGCTTATTGCTTGGTAACATGCATCATCACTGCTATCATTTGTGTGTGCATACACTTGC
TTATAGTTATTCGCCCTAGACAAAGCAATGAGGAAAAAGAGAAAATGCCTTAACCTTTTTCCTCATACCTTTTCTTT
ACAGCATGGCTTCTGTTACAGCTCTAATTATTGCCAGCATTGTCACTGTCGCTCACGGGCAAACAATTGTCCATATT
ACCTTAGGACATAATCACACTCTTGTAGGGCCCCCAATTACTTCAGAGGTTATTTGGACCAAACTTGGAAGTGTTGA
TTATTTTGATATAATTTGCAACAAAACTAAACCAATATTTGTAATCTGTAACAGACAAAATCTCACGTTAATTAATG
TTAGCAAAATTTATAACGGTTACTATTATGGTTATGACAGATCCAGTAGTCAATATAAAAATTACTTAGTTCGCATA
ACTCAGCCCAAATTAACAGTGCCAACTATGACAATAATTAAAATGGCTAATAAAGCATTAGAAAATTTTACATCACC
AACAACACCCAATGAAAAAAACATTCCAAATTCAATGATTGCAATTATTGCGGCGGTGGCATTGGGAATGGCACTAA
TAATAATATGCATGCTCCTATATGCTTGTTACTATAAAAAGTTTCAACATAAACAGGATCCACTACTAAATTTTAAC
ATTTAATTTTTTATACAGATGATTTCCACTACAATTTTTATCATTACTAGCCTTGCAGCTGTAACTTATGGCCGTTC
ACACCTAACTGTACCTGTTGGCTCAACATGTACACTACAAGGACCCCAAGAAGGCTATGTCACTTGGTGGAGAATAT
ATGATAATGGAGGGTTCGCTAGACCATGTGATCAGCCTGGTACAAAATTTTCATGCAACGGAAGAGACTTGACCATT
ATTAACATAACATCAAATGAGCAAGGCTTCTATTATGGAACCAACTATAAAAATAGTTTAGATTACAACATTATTGT
AGTGCCAGCCACCACTTCTGCTCCCCGCAAATCCACTTTCTCTAGCAGCAGTGCCAAAGCAAGCACAATTCCTAAAA
CAGCTTCTGCTATGTTAAAGCTTCCAAAAATCGCTTTAAGTAATTCCACAGCCGCTCCCAATACAATTCCTAAATCA
ACAATTGGCATCATTACTGCCGTGGTAGTGGGATTAATGATTATATTTTTGTGTATAATGTACTACGCCTGCTGCTA
TAGAAAACATGAACAAAAAGGTGATGCATTACTAAATTTTGATATTTAATTTTTTATAGAATTATGATATTGTTTCA
ATCAAATACCACTACCTCCTATGCATACACAAACATTCAGCCTAAATACGCTATGCAACTAGAAATCACAATACTAA
TTGTAATTGGAATTCTTATACTATCTGTTATTCTTTATTTTATATTCTGCCGTCAAATACCCAATGTTCATAGAAAT
TCTAAAAGACGTCCCATCTATTCTCCTATGATTAGTCGTCCCCATATGGCTCTGAATGAAATCTAAGATCTTTTTTT
TTTTCTCTTACAGTATGGTGAACATCAATCATGATCCCTAGAAATTTCTTCTTCACCATACTCATCTGTGCTTTTAA
TGTCTGTGCTACTTTCACAGCAGTAGCCACTGCAAGCCCAGACTGTATAGGACCATTTGCTTCCTATGCACTTTTTG
CCTTCGTTACTTGCATCTGCGTGTGTAGCATAGTCTGCCTGGTTATTAATTTTTTCCAACTGGTAGACTGGATCTTT
GTGCGAATTGCCTACCTACGTCACCATCCCGAATACCGCAATCAAAATGTTGCGGCACTTCTTAGGCTTATTTAAAA
CCATGCAGGCTATGCTACCAGTCATTTTAATTTTGCTACTACCCTGCATTCCCCTAGCTTCCACCGCCACTCGCGCT
ACACCTGAACAACTTAGAAAATGCAAATTTCAACAACCATGGTCATTTCTTGATTGCTACCATGAAAAATCTGATTT
TCCCACATACTGGATAGTGATTGTTGGAATAATTAACATACTTTCATGTACCTTTTTCTCAATCACAATATACCCCA
CATTTAATTTTGGGTGGAATTCTCCCAATGCACTGGGTTACCCACAAGAACCAGATGAACATATTCCACTACAACAC
ATACAACAACCACTAGCACTGGTACAGTATGAAAATGAGCCACAACCTTCACTGCCCCCTGCCATTAGTTACTTCAA
CCTAACCGGCGGAGATGACTGACCCAATCGCCACATCATCCACCGCTGCCAAGGAGCTGCTGGACATGGACGGACGT
GCCTCAGAACAGCGACTCATCCAACTACGCATTCGTCAGCAGCAGGAACGAGCAGTAAAAGAGCTAAGGGATGCCAT
TGGGATTCACCAGTGCAAAAAAGGCATATTCTGCTTAGTAAAACAATCCAAAATCTCCTACGAGATCACCGCTACTG
ACCATCGTCTCTCATACGAGCTCGGTCCGCAGCGACAAAAATTCACCTGCATGGTGGGAATCAACCCCATAGTTATC
ACCCAGCAGTCTGGAGATACTAAGGGTTGTATCCAGTGTTCCTGTGATTCCACCGAGTGCATCTACACACTGCTGAA
GACCCTCTGCGGCCTTCGAGACCTCCTACCCATGAACTAATCATTGCCCCTACCTTACCCAATCAAAATATTAATAA
AGACACTTACTTGAAATCAGCAATACAGTCTTTGTCAAAACTTTCTACCAGCAGCACCTCACCCTCTTCCCAACTCT
GGTACTCTAAACGTCGGAGGGTGGCATACTTTCTCCACACTTTGAAAGGGATGTCAAATTTTATTTCCTCTTCTTTG
CCCACAATCTTCATTTCTTTATCCCCAGATGGCCAAGCGAGCTCGGCTAAGCACTTCCTTCAACCCGGTGTACCCTT
ATGAAGATGAAAGCAGCTCACAACACCCATTTATAAATCCTGGTTTCATTTCCCCTGACGGGTTCACACAAAGTCCA
AACGGGGTTTTAAGTCTTAAATGTGTTAATCCACTTACCACTGCAAGCGGCTCCCTCCAACTTAAAGTGGGAAGTGG
TCTTACAGTAGACACTACTGATGGATCCTTAGAAGAAAACATCAAAGTTAACACCCCCCTAACAAAGTCAAACCATT
CTATAAATTTACCAATAGGAAACGGTTTGCAAATAGAACAAAACAAACTTTGCAGTAAACTCGGAAATGGTCTTACA
TTTGACTCTTCCAATTCTATTGCACTGAAAAATAACACTTTATGGACAGGTCCAAAACCAGAAGCCAACTGCATAAT
TGAATACGGGAAACAAAACCCAGATAGCAAACTAACTTTAATCCTTGTAAAAAATGGAGGAATTGTTAATGGATATG
TAACGCTAATGGGAGCCTCAGACTACGTTAACACCTTATTTAAAAACAAAAATGTCTCCATTAATGTAGAACTATAC
TTTGATGCCACTGGTCATATATTACCAGACTCATCTTCTCTTAAAACAGATCTAGAACTAAAATACAAGCAAACCGC
TGACTTTAGTGCAAGAGGTTTTATGCCAAGTACTACAGCGTATCCATTTGTCCTTCCTAATGCGGGAACACATAATG
AAAATTATATTTTTGGTCAATGCTACTACAAAGCAAGCGATGGTGCCCTTTTTCCGTTGGAAGTTACTGTTATGCTT
AATAAACGCCTGCCAGATAGTCGCACATCCTATGTTATGACTTTTTTATGGTCCTTGAATGCTGGTCTAGCTCCAGA
AACTACTCAGGCAACCCTCATAACCTCCCCATTTACCTTTTCCTATATTAGAGAAGATGACTGACAACAAAAATAAA
GTTCAACATTTTTTATTGAAATTCCTTTTACAGTATTCGAGTAGTTATTTTGCCTCCCCCTTCCCATTTAACAGAAT
ACACCAATCTCTCCCCACGCACAGCTTTAAACATTTGGATACCATTAGAGATAGACATAGTTTTAGATTCCACATTC
CAAACAGTTTCAGAGCGAGCCAATCTGGGGTCAGTAATACATAAAAATGCATCGGGATAGTCTTTTAAAGCGCTTTC
ACAGTCCAACTGTTGCGGATGCGACTCCGGAGTCTGAATCACGGTCATCTGGAAGAAGAACGATGGGAATCATAATC
CGAAAACGGAATCGGGCGATTGTGTCTCATCAAACCCACAAGCAACCGCTGTCTGCGTCGCTCCGTGCGACTGCTGT
TTATGGGATCGGGGTCCGCAGTGTCCTGAAGCATGATTTTAATAGCCCTTAACATTAACTTTCTGGTGCGATGCGCG
CAGCAACGCATTCTGATTTCACTTAGATTACTACAGTAGGTACAGCACATTATCACAATATTGTTTAATAAACCATA
ATTAAAAGCGCTCCAGCCAAAACTCATATCTGATATAATCGCCCCTGCATGACCATCATACCAAAGTTTAATATAAA
TTAAATGTCGTTCCCTCAAAAACACACTACCCACATACATGATCTCTTTTGGCATGTGCATATTAACAATTTGTCTG
TACCATGGACAACGTTGGTTAATCATGCAACCCAATATAACCTTCCGGAACCACACTGCCAACACCGCTCCCCCAGC
CATGCATTGAAGTGAACCCTGCTGATTACAATGACAATGAAGAACCCAATTCTCTCGACCATGAATCACTTGAGACT
GAAAAATATCTATAGTAGCACAACAAAGACATAAATGCATGCATCTTCTCATAATTTTTAACTCCTCTGGATTTAAA
AACATATCCCAAGGAATGGGAAACTCTTGCAGAACAGTAAAGCTGGCAGAACAAGGAAGACCACGAACACAACTTAC
ACTATGCATAGTCATAGTATCACAATCTGGCAACAGCGGGTGGTCTTCAGTCATAGAAGCTCGGGTTTCATTTTCCT
CACATCGTGGTAATTGGGCTCTGGTGTAAGGGTGATGTCTGGCGCATGATGTGGAGCGTGCGCGCAACCTTGTCATA
ATGGAGTTGCTTCCTGACATTCTCGTATTTTGTATAGCAAAACGCTGCCCTGGCACAACACACTCTTCTTCGTCTTC
TATCCTGCCGCTTAGTGTGTTCCGTCTGATAATTCAAGTACAGCCACACTCTTAAGTTGGTCAAAAGAATGCTGGCT
TCAGTTGTAATCAAAACTCCATCATATTTAATTGTTCTAAGGAAATCATCCACGGTAGCATATGCAAATCCCAACCA
AGCAATGCAACTGGATTGCGTTTCAAGCAGCAGAGGAGAGGGAAGAGACGGAAGAATCATGTTAATTTTTATTCCAA
ACGATCTCGCAGTACTTCAAATTGTAGATCGCGCAGATGGCATCTATCGCCCCCACTGTGTTGGTGAAAAAGCACAG
CTAAATCAAAAGAAATGCGATTTTCAAGGTGCTCAACGGTGGCTTCCAACAAAGCCTCCACGCGCACATCCAAAAAC
AAAAGAATACCAAAAGAAGGAGCATTTTCTAACTCCTCAAACATCATATTACATTCCTGCACCATTCCCAGATAATT
TTCAGCTTTCCAGCCTTGAATTATTCGTGTCAGTTCTTGTGGTAAATCCAAACCACACATTACAAACAGGTCCCGGA
GGGCGCCCTCCACCACCATTCTTAAACACACCCTCATAATGACAAAATATCTTGCTCCTGTGTCACCTGTAGCAAAT
TAAGAATGGCATCATCAATTGACATGCCCTTGGCTCTAAGTTCTTCTCTAAGTTCTAGTTGTAGATACTCTCTCATA
TTATCACCAAACTGCTTAGCCAGAAGCCCCCCGGGAACAATAGCAGGGGACGCTACAGTGCAGTACAAGCGCAGACC
TCCCCAATTGGCTCCAGCAAAAACAAGATTAGAATAAGCATACTGGGAACCACCAGTAATATCATCAAAGTTGCTGG
AAATATAATCAGGCAGAGTTTCTTGTAAAAATTGAATAAAAGAAAAATTTTCCAAAGAAACATTCAAAACCGTTGGG
ATGCAAATACAATAGGTTACCGCGCTGCGCTCCAACATTGTTAGTTTTGAATTAGTCTGCAAAATAAAAGAAACAAG
CGTCATATCATAGTAGCCTGTCGAACAGGTGGAAAAATCAGTCTTTCCATCACAAGACAAGCCACAGGGTCTCCAGC
TCGACCCTCGTAAAACCTGTCATTGTGATTAAACAACAGCACCGAAAGTTCCTCGCGGTGGCCAGCATGAATAATTC
TTGATGAAGCATACAATCCAGACATGTTAGCATCAGTTAAAGAGAAAAAACAGCCAACATAGCCTCTGGGTATAATT
ATGCTTAATTTTAAGTATAGCAAAGCCACCCCTCGCGGATACAAAGTAAAAGGCACAGGAGAATAAAAAATATAATT
ATTTCTCTGCTGCTGTTCAGGCAACGTTGCTCCCGGTCCCTCTAAATAGACATACAAAGCCTCATCAGCCATGGCTT
ACCAGGCAAAGTACAGCGGGCGCACAAAGCACAAGCTCTAAAGAAGCTCTAAAAACACTCTCCAACCTCTCCACAAT
ATATACACAAGCCCTAAACTGACGTAATGGGAGTAAAGTGAAAAAAAAATACCGCCAAGCCCAACACACACCCCGAA
ACTGCGTCAGCAGGAAAAAGTACAGTTTCACTTCCGCATTCCCAACAAGCGTAACTTCCTCTTTCTCATGGTACGTC
ACATCCGATTAACTTGCAACGTCATTTTCCCACGGTCGCGCCGCCCCTTTTAGCCGTTAACCCCGCAGCCAATCACC
ACACAGCGCGCACTTTTTTAAATTACCTCATTTACATGTTGGCACCATTCCATCTATAAGGTATATTATATAGATAG

GenBank Accession No. YP 002213796 (SEQ ID NO: 214)

MAKRARLSTSFNPVYPYEDESSSQHPFINPGFISPDGFTQSPNGVLSL
KCVNPLTTASGSLQLKVGSGLTVDTTDGSLEENIKVNTPLTKSNHSIN
LPIGNGLQIEQNKLCSKLGNGLTFDSSNSIALKNNTLWTGPKPEANCI
IEYGKQNPDSKLTLILVKNGGIVNGYVTLMGASDYVNTLFKNKNVSIN
VELYFDATGHILPDSSSLKTDLELKYKQTADFSARGFMPSTTAYPFVL
PNAGTHNENYIFGQCYYKASDGALFPLEVTVMLNKRLPDSRTSYVMTF
LWSLNAGLAPETTQATLITSPFTFSYIREDD

GenBank Accession No. YP_002213774 (SEQ ID NO: 215)

MRRRAVLGGAVVYPEGPPPSYESVMQQQAAMIQPPLEAPFVPPRYLAP
TEGRNSIRYSELSPLYDTTKLYLVDNKSADIASLNYQNDHSNFLTTVV
QNNDFTPTEASTQTINFDERSRWGGQLKTIMHTNMPNVNEYMFSNKFK
ARVMVSRKAPEGVTVNDTYDHKEDILKYEWFEFILPEGNFSATMTIDL
MNNAIIDNYLEIGRQNGVLESDIGVKFDTRNFRLGWDPETKLIMPGVY
TYEAFHPDIVLLPGCGVDFTESRLSNLLGIRKRHPFQEGFKIMYEDLE
GGNIPALLDVTAYEESKKDTTTETTTLAVAEETSEDDDITRGDTYITE
KQKREAAAAEVKKELKIQPLEKDSKSRSYNVLEDKINTAYRSWYLSYN
YGNPEKGIRSWTLLTTSDVTCGAEQVYWSLPDMMQDPVTFRSTRQVNN
YPVVGAELMPVFSKSFYNEQAVYSQQLRQATSLTHVFNRFPENQILIR
PPAPTITTVSENVPALTDHGTLPLRSSIRGVQRVTVTDARRRTCPYVY
KALGIVAPRVLSSRTF

GenBank Accession No. YP_002213779 (SEQ ID NO: 216)

MATPSMMPQWAYMHIAGQDASEYLSPGLVQFARATDTYFSMGNKFRNP
TVAPTHDVTTDRSQRLMLRFVPVDREDNTYSYKVRYTLAVGDNRVLDM
ASTFFDIRGVLDRGPSFKPYSGTAYNSLAPKGAPNTSQWIVTTNGDNA
VTTTTNTFGIASMKGDNITKEGLQIGKDITTTEGEEKPIYADKTYQPE
PQVGEESWTDTDGTNEKFGGRALKPATNMKPCYGSFARPTNIKGGQAK
NRKVKPTTEGGVETEEPDIDMEFFDGRDAVAGALAPEIVLYTENVNLE
TPDSHVVYKPETSNNSHANLGQQAMPNRPNYIGFRDNFVGLMYYNSTG
NMGVLAGQASQLNAVVDLQDRNTELSYQLLLDSLGDRTRYFSMWNQAV
DSYDPDVRIIENHGIEDELPNYCFPLNGIGPGHTYQGIKVKIDDINGW
EKDANVAPANEITIGNNLAMEINIQANLWRSFLYSNVALYLPDVYKYT
PPNITLPTNTNTYEYMNGRVVSPSLVDSYINIGARWSLDPMDNVNPFN
HHRNAGLRYRSMLLGNGRYVPFHIQVPQKFFAVKNLLLLPGSYTYEWN
FRKDVNMVLQSSLGNDLRTDGATISFTSINLYATFFPMAHNTASTLEA
MLRNDTNDQSFNDYLSAANMLYPIPANATNIPISIPSRNWAAFRGWSF
TRLKTKETPSLGSGFDPYFVYSGSIPYLDGTFYLNHTFKKVSIMFDSS
VSWPGNDRLLSPNEFEIKRTVDGEGYNVAQCNMTKDWFLVQMLANYNI
GYQGFYIPEGYKDRMYSFFRNFQPMSRQVVDEVNYTDYKAVTLPYQHN
NSGFVGYLAPTMRQGEPYPANYPYPLIGTTAVKSVTQKKFLCDRTMWR
IPFSSNFMSMGALTDLGQNMLYANSAHALDMTFEVDPMDEPTLLYLLF
EVFDVVRVHQPHRGVIEAVYLRTPFSAGNATT

GenBank Accession No. AC_000018 (SEQ ID NO: 200)

CTCTCTATTTAATATACCTTATAGATGGAATGGTGCCAATATGTAAATGAGGTAATTTAAAAAAGTGCGCGCTGTGT
GGTGATTGGCTGTGGGGTTAACGGCTAAAATGGGCGGGGCGGCCGTGGGAAAATGACGTGACTTATGTGGGAGGAGC
TATGTTGCAAGTTATTGCGGTAAATGTGACGTAAAACGAGGTGTGGTTTGAACACGGAAGTAGACAGTTTTCCCACG
CTTACTGACAGGATATGAGGTAGTTTTGGGCGGATGCAAGTAAAAATTCTCCATTTTCGCGCGAAAACTGAATGAGG
AAGTGAATTTCTGAGTCATTTCGCGGTTATGACAGGGTGGAGTATTTGCCGAGGGCCGAGTAGACTTTGACCGTTTA
CGTGGAGGTTTCGATTACCGTGTTTTTCACCTAAATTTCCGCGTACGGTGTCAAAGTCCTGTGTTTTTACGTAGGTG
TCAGCTGATCGCTAGGGTATTTAAACCTGACGAGTTCCGTCAAGAGGCCACTCTTGAGTGCCAGCGAGAAGAGTTTT
CTCCTTCGCGCCGCAAGTCAGTTCTGCGCTTTGAAAATGAGACACCTGCGTTTCCTGCCACAGGAGATTATCTTCAG
TGAGACCGGGATCGAAATACTGGAGTTTGTGGTAAATACCCTAATGGGAGACGACCCGGAACCGCCAGTGCAGCCTT
TCGATCCACCTACGCTGCACGATCTGTATGATTTAGAGGTAGACGGGCCTCAGGATCCCAATGAGGAAGCTGTGAAT
GGGTTTTTTACTGATTCTATGCTGCTAGCTGCCGATGAAGGATTGGACATAAACCCTCCTCCTGAGACCCTTGTTAC
CCCAGGGGTGGTTGTGGAAAGCGGCAGAGGTGGGAAAAAATTGCCTGATCTGGGAGCAGCTGAAATGGACTTGCGTT
GTTATGAAGAGGGTTTTCCTCCGAGTGATGATGAAGATGGGGAAACTGAGCAGTCCATCCATACCGCAGTGAATGAG
GGAGTAAAAGCTGCCAGCGATGTTTTTAAGTTGGACTGTCCGGAGCTGCCTGGACATGGCTGTAAGTCTTGTGAATT
TCACAGGAATAACACTGGAATGAAAGAACTATTGTGCTCGCTTTGCTATATGAGAATGCACTGCCACTTTATTTACA
GTAAGTGTATTTAAGTGAAATTTAAAGGAATAGTGTAGCTGTTTAATAACTGTTGAATGGTAGATTTATGTTTTTTA
CTTGTGATTTTTTGTAGGTCCTGTGTCTGATGATGAGTCACCTTCTCCTGATTCAACTACCTCACCTCCTGAAATTC
AGGCGCCCGCACCTGCAAACGTATGCAAGCCCATTCCTGTAAAGCCTAAGCCTGGGAAACGCCCTGCTGTGGATAAG
CTTGAGGACTTGTTGGAGGGTGGGGATGGACCTTTGGACCTTAGTACCCGGAAACTGCCAAGGCAATAAGTGCCCTG
CAGCTGTGTTTATTTAATGTGACGTCATGTAATAAAATTATGTCAGCTGCTGAGTGTTTTATTACTTCTTGGGTGGG
GACTTGGATATATAAGTAGGAGCAGATCTGTGTGGTTAGCTCACAGCAACCTGCTGCCATCCATGGAGGTTTGGGCT
ATCTTGGAAGACCTCAGACAGACTAGGCTACTGCTAGAAAACGCCTCGGACGGAGTCTCTGGCCTTTGGAGATTCTG
GTTCGGTGGTGATCTAGCTAGGCTAGTGTTTAGGATAAAACAGGACTACAGCGTAGAATTTGAAAAGTTATTGGACG
ACAGTCCAGGACTTTTTGAAGCTCTTAACTTGGGTCATCAGGCTCATTTTAAGGAGAAGGTTTTATCAGTTTTAGAT
TTTTCTACTCCTGGTAGAACTGCTGCTGCTGTAGCTTTTCTTACTTTTATATTGGATAAATGGATCCGCCAAACTCA
CTTCAGCAAGGGATACGTTTTGGATTTCATAGCAGCAGCTTTGTGGAGAACATGGAAGGCTCGCAGGATGAGGACAA
TCTTAGATTACTGGCCAGTGCAGCCTCTAGGAGTAGCAGGGATACTGAGACACCCACCGACCATGCCAGCGGTTCTG
CAGGAGGAGCAGCAGGAGGACAATCCGAGAGCCGGCCTGGACCCTCCGGTGGAGGAGTAGCTGACCTGTTTCCTGAA
CTGCGACGGGTGCTTACTAGGTCTACGACCAGTGGACAGAACAGAGGCATTAAGAGGGAGAGGAATCCTAGTGGGAA
TAATTCAAGAACCGAGTTGGCTTTAAGTTTAATGAGCCGCAGGCGTCCTGAAACTGTTTGGTGGCATGAGGTTCAGA
GCGAAGGCAGGGATGAAGTTTCAATATTGCAGGAGAAATATTCACTAGAACAACTTAAGACCTGTTGGTTGGAACCT
GAGGATGATTGGGAGGTGGCCATTAGGAATTATGCTAAGATATCTCTGAGGCCTGATAAACAATATAGAATTACTAA
GAAGATTAATATTAGAAATGCATGCTACATATCAGGGAATGGGGCAGAGGTTATAATAGATACACAAGATAAAGCAG
CTTTTAGATGTTGTATGATGGGTATGTGGCCAGGGGTTGTCGGCATGGAAGCAGTAACACTTATGAATATTAGGTTT
AGAGGGGATGGGTATAATGGCATTGTATTTATGGCTAACACTAAGCTGATTCTACATGGTTGTAGCTTTTTTGGGTT
TAATAATACGTGTGTAGAAGCTTGGGGGCAAGTTAGTGTGAGGGGTTGTAGTTTTTATGCATGCTGGATTGCAACAT
CAGGTAGGGTCAAGAGTCAGTTGTCTGTGAAGAAATGCATGTTTGAGAGATGTAATCTTGGCATACTGAATGAAGGT
GAAGCAAGGATCCGCCACTGCGCAGCTACAGAAACTGGCTGCTTCATTCTAATAAAGGGAAATGCCAGTGTGAAGCA
TAATATGATCTGTGGACATTCGGATGAGAGGCCTTATCAGATGCTGACCTGCGCTGGTGGACATTGCAATATTCTTG
CTACTGTGCATATCGTTTCACATGCACGCAAGAAATGGCCTGTATTTGAACATAATGTGATTACCAAGTGCACCATG
CACATAGGTGGTCGCAGGGGAATGTTTATGCCTTACCAGTGTAACATGAATCATGTGAAGGTAATGTTGGAACCAGA
TGCCTTTTCCAGAGTGAGCTTAACAGGAATCTTTGATATGAATATTCAACTATGGAAGATCCTGAGATATGATGACA
CTAAACCGAGGGTGCGCGCATGCGAATGCGGAGGCAAGCATGCTAGATTCCAGCCGGTGTGCGTGGATGTGACTGAA
GACCTGAGACCCGATCATTTGGTGCTTGCCTGCACTGGAGCGGAGTTCGGTTCCAGTGGTGAAGAAACTGACTAAAG
TGAGTAGTGGGGGCAAGATGTGGATGGGGACTTTCAGGTTGGTAAGGTGGACAGATTGGGTAAATTTTGTTAATTTC
TGTCTTGCAGCTGCCATGAGTGGAAGCGCTTCTTTTGAGGGGGGAGTATTTAGCCCTTATCTGACGGGCAGGCTCCC
ACCATGGGCAGGAGTTCGTCAGAATGTCATGGGATCCACTGTGGATGGGAGACCCGTCCAGCCCGCCAATTCCTCAA
CGCTGACCTATGCCACTTTGAGTTCGTCACCATTGGATGCAGCTGCAGCCGCCGCCGCTACTGCTGCCGCCAACACT
ATCCTTGGAATGGGCTATTACGGAAGCATCGTTGCCAATTCCAGTTCCTCTAATAACCCTTCAACCCTGGCTGAGGA
CAAGCTACTTGTTCTGTTGGCTCAGCTCGAGGCCTTAACCCAACGCTTAGGCGAACTGTCTAAGCAGGTGGCCCAGT
TGCGTGAGCAAACTGAGTCTGCTGTTGCTACAGCAAAGTCTAAATAAAGATCTCAAATCAATAAATAAAGAAATACT
TGTTATAAAAACAAATGAATGTTTATTTGATTTTTCGCGCGCGGTATGCCCTGGACCATCGGTCTCGATCATTGAGA
ACTCGGTGGATCTTTTCCAGTACCCTGTAAAGGTGGGATTGAATGTTTAGATACATAGGCATTAGTCCGTCTCGGGG
GTGGAGATAGCTCCATTGAAGAGCCTCTTGCTCCGGGGTAGTGTTATAAATCACCCAGTCATAGCAAGGTCGGAGTG
CATGGTGTTGCACAATATCTTTTAGGAGCAGACTAATTGCAACGGGGAGGCCCTTAGTGTAGGTGTTTACAAATCTA
TTGAGCTGGGACGGGTACATCCGGGGTGAAATTATATGCATTTTGGACTGGATCTTGAGGTTGGCAATGTTGCCGCC
TAGATCCCGTCTCGGGTTCATATTGTGCAGGACCACTAAGACAGTGTATCCGGTGCACTTGGGAAATTTATCATGCA
GCTTAGAGGGAAAAGCATGAAAAAATTTGGAGACGCCTTTGTGACCCCCCAGATTCTCCATGCACTCATCCATAATG
ATAGCGATGGGGCCGTGGGCAGCGGCACGGGCGAACACGTTCCGGGGGTCTGAAACATCATAGTTATGCTCCTGAGT
CAGGTCATCATAAGCCATTTTAATAAACTTTGGGCGGAGGGTGCCAGATTGGGGGATGAAAGTTCCCTCTGGCCCGG
GAGCATAGTTCCCCTCACATATTTGCATTTCCCAGGCTTTCAGTTCAGAGGGGGGGATCATGTCCACCTGCGGGGCT
ATAAAAAATACCGTTTCTGGAGCCGGGGTGATTAACTGGGATGAGAGCAAATTCCTAAGCAGCTGAGACTTGCCGCA
CCCAGTGGGACCGTAAATGACCCCAATTACGGGTTGCAGATGGTAGTTTAGGGAGCGACAGCTGCCGTCCTCCCGGA
GTAGGGGGGCCACTTCGTTCATCATTTCCCTTACATGGATATTTTCCCGCACCAAGTCCGTTAGGAGGCGCTCTCCC
CCAAGGGATAGAAGCTCCTGGAGCGAGGAGAAGTTTTTCAGCGGCTTCAGCCCGTCAGCCATGGGCATTTTGGAAAG
AGTCTGTTGCAAGAGCTCGAGCCGGTCCCAGAGCTCGGTGATGTGCTCTATGGCATCTCGATCCAGCAGACCTCCTC
GTTTCGCGGGTTGGGACGGCTCCTGGAGTAGGGAATCAGACGATGGGCGTCCAGCGCTGCCAGGGTCCGATCCTTCC
ATGGTCGCAGCGTCCGAGTCAGGGTTGTTTCCGTCACGGTGAATGGGTGCGCGCCTGGTTGGGCGCTTGCGAGGGTG
CGCTTCAGACTCATCCTGCTGGTCGAGAACCGCTGCCGATCGGCGCCCTGCATGTCGGCCAGGTAGCAGTTTACCAT
GAGTTCGTAGTTGAGCGCCTCGGCCGCGTGGCCTTTGGCACGGAGCTTACCTTTGGAAGTTTTATGGCAGGCGGGGC
AGTAGATACATTTGAGGGCATACAGCTTGGGCGCGAGGAAAATGGATTCGGGGGAGTATGCATCCGCACCGCAGGAG
GCGCAGACGGTTTCGCACTCCACGAGCCAGGTCAGATCCGGCTCATCGGGGTCAAAAACAAGTTTTCCGCCATGTTT
TTTGATGCGTTTCTTACCTTTGGTTTCCATGAGGTCGTGTCCCCGCTGGGTGACAAAGAGGCTGTCCGTGTCCCCGT
AGACCGACTTTATGGGCCTGTCCTCGAGCGGAGTGCCTCGGTCCTCTTCGTAGAGGAACCCAGCCCACTCTGATACA
AAAGCGCGTGTCCAGGCCAGCACAAAGGAGGCCACGTGGGAGGGGTAGCGGTCGTTGTCAACCAGGGGGTCCACCTT
CTCTACGGTATGTAAACACATGTCCCCCTCCTCCACATCCAAGAATGTGATTGGCTTGTAAGTGTAGGCCACGTGAC
CAGGGGTCCCCGCCGGGGGGGTATAAAAGGGGGCGGGCCTCTGTTCGTCCTCACTGTCTTCCGGATCGCTGTCCAGG
AGCGCCAGCTGTTGGGGTAGGTATTCCCTCTCGAAGGCGGGCATGACCTCTGCACTCAGGTTGTCAGTTTCTAGGAA
CGAGGAGGATTTGATATTGACAGTACCAGCAGAGATGCCTTTCATAAGACTCTCGTCCATCTGGTCAGAAAACACAA
TCTTCTTGTTGTCCAGCTTGGTAGCAAATGATCCATAGAGGGCATTGGATAGAAGCTTGGCGATGGAGCGCATGGTT
TGGTTCTTTTCCTTGTCCGCGCGCTCCTTGGCGGCGATGTTAAGCTGGACGTACTCGCGCGCCACACATTTCCATTC
AGGGAAGATGGTTGTCAGTTCATCCGGAACTATTCTGACTCGCCATCCCCTATTGTGCAGGGTTATCAGATCCACAC
TGGTGGCCACCTCGCCTCGGAGGGGCTCATTGGTCCAGCAGAGTCGACCTCCTTTTCTTGAACAGAAAGGGGGGAGG
GGGTCTAGCATGAGCTCATCAGGGGGGTCCGCATCTATGGTAAATATTCCCGGTAGCAAATCTTTGTCAAAATAGCT
GATGGTGGTGGGATCATCCAAGGTCATCTGCCATTCTCGAACTGCCAGCGCGCGCTCATAGGGGTTAAGAGGGGTGC
CCCAGGGCATGGGGTGGGTGAGCGCGGAGGCATACATGCCACAGATATCGTATACATAGAGGGGCTCTTCGAGGATG
CCGATGTAAGTGGGATAACAGCGCCCCCCTCTGATGCTTGCTCGCACATAGTCATAGAGTTCATGTGAGGGGGCGAG
AAGACCCGGGCCCAGATTGGTGCGGTTGGGTTTTTCCGCCCTGTAAACGATCTGGCGAAAGATGGCATGGGAATTTG
AAGAGATAGTAGGTCTCTGGAATATGTTAAAATGGGCATGAGGTAGGCCTACAGAGTCCCTTATGAAGTGGGCATAT
GACTCTTGCAGCTTGGCTACCAGCTCGGCGGTGACGAGTACATCCAGGGCACAGTAGTCGAGAGTTTCCTGGATGAT
GTCATAACGCGGTTGGCTTTTCTTTTCCCACAGCTCGCGGTTGAGAAGGTATTCTTCGCGATCCTTCCAGTACTCTT
CGAGGGGAAACCCGTCTTTTTCTGCACGGTAAGAGCCCAACATGTAGAACTGATTGACTGCCTTGTAGGGACAGCAT
CCCTTCTCCACTGGGAGAGAGTATGCTTGGGCTGCATTGCGCAGCGAGGTATGAGTGAGGGCAAAAGTGTCCCTGAC
CATGACTTTGAGGAATTGATACTTGAAGTCCATGTCATCACAGGCCCCCTGTTCCCAGAGTTGGAAGTCCACCCGCT
TCTTGTAGGCGGGGTTGGGCAAAGCGAAAGTAACATCATTGAAGAGGATCTTGCCGGCCCTGGGCATGAAATTTCGG
GTGATTCTGAAAGGCTGAGGGACCTCTGCTCGGTTATTGATAACCTGAGCGGCCAAGACGATCTCATCAAAGCCATT
GATGTTGTGCCCCACTATGTACAGTTCTAAGAATCGAGGGGTGCCCCTGACATGAGGCAGCTTCTTGAGTTCTTCAA
AAGTGAGATCTGTAGGGTCAGTGAGAGCATAGTGTTCGAGGGCCCATTCGTGCACGTGAGGGTTCGCTTTGAGGAAG
GAGGACCAGAGGTCCACTGCGAGTGCTGTTTGTAACTGGTCCCGGTATTGACGAAAATGCTGCCCGACTGCCATTTT
TTCTGGGGTGACGCAATAGAAGGTTTGGGGGTCCTGCCGCCAGCGATCCCACTTAAGTTTCATGGCGAGGTCATAGG
CGATGTTGACGAGCCGCTGGTCTCCAGAGAGTTTCATGACCAGCATGAAGGGGATTAGCTGCTTGCCAAAGGACCCC
ATCCAGGTGTAGGTTTCCACATCGTAGGTGAGGAAGAGCCTTTCTGTGCGAGGATGAGAGCCAATCGGGAAGAACTG
GATCTCCTGCCACCAGTTGGAGGAATGGCTGTTGATGTGATGGAAGTAGAACTCCCTGCGACGCGCCGAGCATTCAT
GCTTGTGCTTGTACAGACGGCCGCAGTACTCGCAGCGATTCACGGGATGCACCTCATGAATGAGTTGTACCTGACTT
CCTTTGACGAGAAATTTCAGTGGAAAATTGAGGCCTGGCGTTTGTACCTGGCGCTCTACTATGTTGTCTGCATCGGC
ATGACCATCTTCTGTCTCGATGGTGGTCATGCTGACGAGCCCTCGCGGGAGGCAAGTCCAGACCTCGGCGCGGCAGG
GGCGGAGCTCGAGGACGAGAGCGCGCAGGCCGGAGCTGTCCAGGGTCCTGAGACGCTGCGGAGTCAGGTTAGTAGGC
AGTGTCAGGAGATTGACTTGCATGATCTTTTCGAGGGCGTGAGGGAGGTTCAGATGGTACTTGATCTCCACGGGTCC
GTTGGTGGAGATGTCAATGGCTTGCAGGGTTCCGTGCCCCTTGGGCGCTACCACCGTGCCCTTGTTTTTCCTTTTGG
GCGGCGGTGGCTCTGTTGCTTCTTGCATGTTTAGGAGCGGTGTCGAGGGCGCGCACCGGGCGGCAGGGGCGGCTCGG
GACCCGGCGGCATGGCTGGCAGTGGTACGTCGGCGCCGCGCGCGGGTAGGTTCTGGTACTGCGCCCTGAGAAGACTC
GCATGTGCGACGACGCGGCGGTTGACATCCTGGATCTGACGCCTCTGGGTGAAAGCTACCGGCCCCGTGAGCTTGAA
CCTGAAAGAGAGTTCAACAGAATCAATCTCGGTATCGTTGACGGCGGCTTGCCTAAGGATTTCTTGCACGTCGCCAG
AGTTATCCTGGTAGGCGATCTCGGCCATGAACTGCTGGATCTCTTCCTCTTGAAGATCTCCGCGGCCCGCTCTCTCG
ACGGTGGCCGCTAGGTCGTTGGAGATGCGCCCAATGAGTTGAGAGAATGCATTCATGCCCGCCTCGTTCCAGACGCG
GCTGTAGACCACAGCCCCCACGGGATCTCTCGCGCGCATAACCACCTGGGCGAGGTTAAGCTCTACGTGGCGGGTGA
AGACCGCATAGTTGCATAGGCGCTGGAAAAGGTAGTTGAGTGTGGTGGCGATGTGCTCGGTGACGAAGAAATACATG
ATCCATCGTCTCAGCGGCATCTCGCTGACATCGCCCAGCGCTTCCAAGCGCTCCATGGCCTCGTAGAAGTCCACGGC
AAAGTTGAAAAACTGGGAGTTACGCGCGGACACGGTCAACTCCTCTTCCAGAAGACGGATGAGTTCGGCAATGGTGG
TGCGCACCTCGCGCTCGAAATCCCCCGGGATTTCTTCCTCAATCTCTTCTTCTTCCACTAACATCTCTTCCTCTTCA
GGTGGGGCTGCAGGAGGAGGGGGAACGCGGCGACGCCGGCGGCGCACGGGCAGACGGTCGATGAATCTTTCAATGAC
CTCTCCGCGGCGGCGGCGCATGGTCTCGGTGACGGCACGACCGTTCTCCCTGGGTCTCAGAGTGAAGACGCCTCCGC
GCATCTCCCTGAAGTGGTGACTGGGAGGCTCTCCGTTGGGCAGGGACACCGCGCTGATTATGCATTTTATCAATTGC
CCCGTAGGTACTCCGCGCAAGGACCTGATCGTCTCAAGATCCACGGGATCTGAAAACCTTTCGACGAAAGCGTCTAA
CCAGTCGCAATCGCAAGGTAGGCTGAGCACTGTTTCTTGCGGGCGGGGGCGGCTAGACGCTCGGTCGGGGTTCTCTC
TTTCTTTTCCTTCCTCCTCTTGGGAGGATGAGACGATGCTGCTGGTGATGAAATTAAAATAGGCAGTTTTGAGACGG
CGGATGGTGGCGAGGAGCACCAGGTCTTTGGGTCCGGCTTGTTGGATGCGCAGGCGATGGGCCATTCCCCAAGCATT
ATCCTGACATCTGGCCAGATCTTTATAGTAGTCTTGCATGAGTCGTTCCACGGGCACTTCTTCTTCGCCCGCTCTGC
CATGCATGCGAGTGATCCCGAACCCGCGCATGGGCTGGACAAGTGCCAGGTCCGCTACAACCCTTTCGGCGAGGATG
GCTTGCTGCACCTGGGTGAGGGTGGCTTGGAAGTCGTCAAAGTCCACAAAGCGGTGGTAGGCCCCGGTGTTGATTGT
GTAGGAGCAGTTGGCCATGACTGACCAGTTGACTGTCTGGTGCCCAGGGCGCACGAGCTCGGTGTACTTGAGGCGCG
AGTATGCGCGGGTGTCAAAGATGTAATCGTTGCAGGTGCGCACCAGGTACTGGTAGCCGATGAGAAAGTGTGGCGGT
GGCTGGCGGTACAGGGGCCATCGCTCTGTAGCCGGGGCTCCGGGGGCAAGGTCTTCCAGCATGAGGCGGTGGTAACC
GTAGATGTACCTGGACATCCAGGTGATACCGGAGGCGGTGGTGGATGCCCGCGGGAACTCGCGTACGCGGTTCCAGA
TGTTGCGCAGCGGCATGAAGTAGTTCATGGTAGGCACGGTTTGGCCCGTGAGACGTGCACAGTCGTTGATGCTCTAG
ACATACGGGCAAAAACGAAAGCGGTCAGCGGCTCGTCTCCGTGGCCTGGAGGCTAAGCGAACGGGTTGGGCTGCGCG
TGTACCCCGGTTCGAATCTCGGATCAGGCTGGAGCCGCAGCTAACGTGGTACTGGCACTCCCGTCTCGACCCAGGCC
TGCACAAAACCTCCAGGATACGGAGGCGGGTCGTTTTTTTGCTTTTTCCTGGATGGGAGCCAGTGCTGCGTCAAGCT
TTAGAACACTCAGTTCTCGGGGCTGGGAGTGGCTCGCGCCCGTAGTCTGGAGAATTAATCGCCAGGGTTGCGTTGCG
GTGTGCCCCGGTTCGAGTCTTAGCGCGCCGGATCGGCCGGTTTCCGCGACGTTTCTAAGACCCCGCCAGCCGACTTC
TCCAGTTTACGGGAGCGAGCCCTCTTTTTTTTTTTTGTTTTTTGTTGCCCAGATGCATCCCGTGCTGCGACAGATGC
GCCCCCAGCAACAGCCCCCTTCTCAGCAGCAGCTACAACAACAGCCACAAAAGGCTCTTCCTGCTCCTGTAACTACT
GCGGCTGCAGCCGTCAGCGGCGCGGGACAGCCCGCCTATGATCTGGAATTGGAAGAGGGCGAGGGACTGGCGCGCCT
GGGCGCACCATCGCCCGAGCGGCACCCGCCCAGCCGACTTCTCCAGTTTACGGGAGCGAGCCCTCTTTTTTTTTTTT
GTTTTTTGTTGCCCAGATGCATCCCGTGCTGCGACAGATGCGCCCCCAGCAACAGCCCCCTTCTCAGCAGCAGCTAC
AACAACAGCCACAAAAGGCTCTTCCTGCTCCTGTAACTACTGCGGCTGCAGCCGTCAGCGGCGCGGGACAGCCCGCC
TATGATCTGGAATTGGAAGAGGGCGAGGGACTGGCGCGCCTGGGCGCACCATCGCCCGAGCGGCACCCGCGGGTGCA
ACTGAAAAAGGACTCTCGCGAGGCGTACGTGCCCCAGCAGAACCTGTTCAGGGACAGGAGCGGTGAGGAGCCAGAGG
AGATGCGAGCATCTCGATTTAACGCGGGTCGCGAGCTGCGCCACGGTCTGGATCGAAGACGGGTGCTGCAAGACGAG
GATTTTGAGGTCGATGAAGTGACAGGGATCAGCCCAGCTAGGGCACATGTGGCCGCGGCCAACCTAGTCTCAGCCTA
CGAGCAGACCGTGAAGGAGGAGCGCAACTTCCAAAAATCTTTTAACAACCATGTGCGCACCCTGATCGCCCGCGAGG
AAGTGACCCTGGGTCTGATGCATCTGTGGGACCTGATGGAGGCTATCACCCAGAACCCCACTAGCAAACCACTGACA
GCTCAGCTGTTTCTGGTGGTTCAACATAGCAGGGACAACGAGGCATTCAGGGAGGCGTTGTTGAACATCACCGAGCC
TGATGGGAGATGGCTGTATGATCTGATCAACATCCTGCAAAGTATTATAGTGCAGGAACGTAGCCTGGGTTTGGCTG
AGAAAGTGGCAGCTATCAACTACTCGGTCTTGAGCCTGGGCAAATACTACGCTCGCAAGATCTACAAGACCCCCTAC
GTACCCATAGATAAGGAGGTAAAGATAGATGGGTTTTACATGCGCATGACTCTGAAGGTGCTGACTCTGAGCGACGA
TCTGGGGGTGTATCGCAATGACAGGATGCACCGCGCGGTGAGCGCCAGCAGGAGGCGCGAGCTGAGCGACAGAGAAC
TTATGCACAGCTTGCAAAGAGCTCTAACGGGGGCCGGGACTGATGGGGAGAACTACTTTGACATGGGAGCGGACTTG
CAATGGCAACCCAGTCGCAGGGCCATGGAGGCTGCAGGGTGTGAGCTTCCTTACATAGAAGAGGTGGATGAAGTCGA
GGACGAGGAGGGCGAGTACTTGGAAGACTGATGGCGCGACCCGTATTTTTGCTAGATGGAACAGCAGCAGGCACCGG
ACCCCGCAATGCGGGCGGCGCTGCAGAGCCAGCCGTCCGGCATTAACTCTTCGGACGATTGGACCCAGGCCATGCAA
CGCATAATGGCGCTGACGACCCGCAACCCCGAAGCCTTTAGACAGCAACCCCAGGCCAACCGCCTTTCGGCCATACT
GGAGGCCGTAGTGCCCTCCCGCTCCAACCCCACCCACGAGAAGGTCCTGGCTATCGTGAACGCGCTGGTGGAGAACA
AGGCCATCCGTCCCGATGAGGCCGGGCTGGTATACAATGCTCTCTTGGAGCGCGTGGCCCGTTACAACAGCAGCAAC
GTGCAAACCAACCTGGACAGGATGGTGACCGATGTGCGCGAGGCCGTGTCTCAGCGCGAGCGGTTCCAGCGCGGCGC
CAACTTGGGGTCGTTGGTAGCGCTAAACGCTTTCCTCAGCACCCAGCCCGCCAACGTGCCCCGTGGTCAGCAAGACT
ATACAAACTTTTTGAGTGCATTGAGACTCATGGTAGCTGAGGTGCCCCAGAGCGAGGTGTACCAGTCCGGGCCAGAT
TACTTCTTCCAGACCAGCAGACAGGGCTTGCAGACAGTGAACCTGACTCAGGCTTTCAAGAACCTGAAGGGTCTGTG
GGGAGTGCACGCCCCAGTAGGAGATCGCGCGACCGTGTCTAGCTTGCTGACTCCCAACTCCCGCCTGCTGCTGCTGC
TGGTATCCCCCTTTACTGACAGCGGTAGCATCGACCGCAACTCGTACTTGGGCTACCTGCTTAACCTGTATCGCGAG
GCCATAGGGCAGAGCCAGGTGGACGAGCAGACCTATCAAGAAATCACCCAAGTGAGCCGCGCCCTGGGTCAGGAAGA
CACGGGCAGTTTGGAAGCCACCCTGAACTTCTTGCTAACCAACCGGTCGCAGAAGATCCCTCCTCAGTATGCGCTTA
CCGCTGAGGAGGAGCGGATCCTCAGATACGTGCAACAGAGCGTTGGACTGTTTCTGATGCAGGAGGGGGCGACACCT
ACCGCCGCGCTGGACATGACAGCTCGAAACATGGAGCCCAGCATGTATGCTAGTAACAGGCCTTTCATTAACAAACT
GCTGGACTACCTGCACAGGGCGGCCGCCATGAACTCTGATTATTTCACCAATGCTATCCTGAACCCACACTGGCTGC
CCCCACCTGGTTTCTACACTGGCGAGTACGACATGCCCGACCCCAATGACGGGTTCCTGTGGGACGATGTGGACAGC
AGCATATTCTCCCCGCCTCCCGGTTATACAGTTTGGAAGAAGGAAGGGGGCGATAGAAGACACTCTTCCGTGTCGCT
GTCCGGAACGGCTGGTGCTGCCGCGACCGTGCCCGAAGCTGCAAGTCCTTTCCCTAGCTTGCCCTTTTCACTAAACA
GCGTTCGCAGCAGTGAACTGGGGAGAATAACCCGCCCGCGCTTGATGGGCGAGGATGAGTACTTGAATGACTCTTTG
CTGAGGCCAGAGAGGGAAAAGAACTTCCCCAACAATGGAATAGAGAGTCTGGTGGATAAGATGAGTAGATGGAAGAC
CTATGCGCAGGATCACAGAGACGAGCCCAGGATATTGGGGGCTACAAGCAGACCGACCCGTAGACGCCAGCGCCACG
ACAGACAGATGGGTCTTGTGTGGGACGATGAGGACTCTGCCGATGATAGCAGCGTGTTGGACTTGGGTGGAAGAGGA
GGGGGCAACCCGTTCGCTCATCTGCGTCCCAGATTCGGGCGCATGTTGTAAAAGTGAAAGTAAAATAAAAATGCAAC
TCACCAAGGCCATGGCGACCGAGCGTGCGTTCGTTCTTTTTTGTTATCTGTGTCTAGTACGATGAGGAGACGAGCCG
TGCTAGGCGGAGCGGTGGTGTATCCGGAGGGTCCTCCTCCTTCTTACGAGAGCGTGATGCAGCAACAGGCGGCGATG
ATACAGCCCCCACTGGAGGTTCCCTTCGTACCCCCGCGGTACCTGGCGCCTACGGAAGGGAGAAACAGCATTCGTTA
CTCGGAGCTGTCGCCCCTGTACGATACCACCAAGTTGTATCTGGTTGACAACAAGTCGGCGGACATCGCCTCCCTGA
ACTATCAGAACGACCACAGCAACTTCCTGACCACGGTGGTGCAGAACAATGACTTTACCCCCACGGAGGCTAGCACC
CAGACCATCAACTTTGACGAACGGTCGCGATGGGGCGGTCATCTGAAGACCATCATGCACACCAACATGCCCAACGT
GAACGAGTACATGTTCAGCAACAAGTTCAAGGCGAGGGTGATGGTGTCCAGAAAAGCTCCTGAAGGTGTTACAGTAA
ATGACACCTATGATCATAAAGAGGATATCTTGAAGTATGAGTGGTTTGAGTTCATTTTACCAGAAGGCAACTTTTCA
GCCACCATGACGATCGACCTGATGAACAATGCCATCATTGACAACTACCTGGAAATTGGCAGACAGAATGGAGTGCT
GGAAAGTGACATTGGTGTTAAGTTTGACACTAGAAATTTCAGGCTCGGGTGGGACCCCGAAACTAAGTTGATTATGC
CAGGAGTCTACACTTATGAGGCATTCCATCCTGACATTGTATTGCTGCCTGGTTGCGGGGTAGACTTTACTGAAAGC
CGACTTAGCAACTTGCTTGGCATCAGGAAGAGACATCCATTCCAGGAGGGTTTCAAAATCATGTATGAAGATCTTGA
AGGGGGTAATATTCCTGCCCTTTTGGATGTCACTGCCTATGAGGAAAGCAAAAAGGATACCACTACTGAAACAACCA
CACTGGCTGTTGCAGAGGAAACTAGTGAAGATGATAATATAACTAGAGGAGATACCTATATAACAGAAAAACACAAA
CGTGAAGCTGCAGCTGCTGAAGTTAAAAAAGAGTTAAAGATCCAACCTCTAGAAAAAGACAGCAAGAGTAGAAGCTA
CAATGTCTTGGAAGACAAAATCAACACGGCCTACCGCAGTTGGTACCTGTCCTACAATTACGGTAACCCTAAGAAAG
GAATAAGGTCTTGGACACTGCTCACCACTTCAGATGTCACCTGTGGGGCAGAGCAGGTTTACTGGTCGCTCCCTGAC
ATGATGCAAGACCCAGTCACGTTCCGCTCCACAAGACAAGTCAACAACTACCCAGTGGTGGGTGCAGAGCTTATGCC
CGTCTTCTCAAAGAGTTTCTACAATGAGCAAGCCGTGTACTCTCAGCAGCTCCGACAGGCCACTTCGCTCACGCACG
TCTTCAACCGCTTCCCTGAGAACCAGATCCTCATCCGCCCGCCGGCGCCCACAATTACCACCGTCAGTGAAAACGTT
CCTGCTCTCACAGATCACGGGACCCTGCCGTTACGCAGCAGTATCCGGGGAGTCCAGCGCGTGACCGTTACTGACGC
CAGACGCCGCACCTGTCCCTACGTTTACAAGGCCCTGGGCATAGTCGCGCCGCGCGTTCTTTCAAGCCGCACTTTCT
AAAAAAAAAAAATGTCCATTCTCATCTCGCCCAGTAATAATACCGGTTGGGGACTGTATGCGCCCACCAAGATGTAT
GGAGGCGCCCGCAAACGCTCTACCCAGCACCCTGTGCGCGTTCGCGGTCATTTCCGCGCTCCCTGGGGCGCACTCAA
GGGTCGTACCCGCACTCGGACCACGGTCGATGATGTGATCGACCAGGTGGTCGCCGATGCTCGTAATTATACTCCTA
CTGCGCCTACATCTACTGTGGATGCAGTTATTGACAGTGTGGTGGCAGACGCCCGCGCCTATGCTCGCCGGAAGAGC
CGAAGGAGGCGCATCGCCAGGCGCCACAGGGCTACTCCCGCCATGCGAGCTGCAAAAGCTATTCTGCGGAGGGCCAA
ACGTGTGGGGCGAAGAGCCATGCTTAGAGCGGCCAGACGCGCGGCTTCAGGTGCCAGCAGCGGCAGGTCCCGCAGGC
GCGCGGCCACGGCGGCAGCAGCGGCCATTGCCAACATGGCCCAACCGCGAAGAGGCAATGTGTACTGGGTGCGTGAT
GCCACTACCGGCCAGCGCGTGCCCGTGCGCACTCGCCCCCCTCGCACTTAGAAGATACTGAGCAGTCTCCGATGTTG
TGTCCCAGCGGCAAGTATGTCCAAGCGCAAATACAAGGAAGAGATGCTCCAGGTCATCGCGCCTGAAATCTACGGTC
CACCGGTGAAGGATGAAAAAAAGCCCCGCAAAATCAAGCGGGTCAAAAATAACAAAAAGGAAGAAGATGACGATGAT
GGGCTGGTGGAGTTTGTGCGCGAGTTCGCCCCAAGACGGCGCGTGCAGTGGCGCGGGCGCAAAGTGCGTCAAGTGCT
CAGACCCGGGACCACTGTGGTTTTTACACCCGGCGAGCGTTCCAGCACTACTTTTAAACGGTCCTATGATGAGGTGT
ACGGGGATGACAATATTCTTGAGCAGGCGGCAGACCGCCTTGACGAGTTTGCTTATGGCAAGCGCACTAGATCCAGT
CCCAAAGAGGAGGCGGTGTCCATTCCTTTGGATCATGGAAATCCCACCCCCAGCCTCAAACCAGTCACCCTGCAGCA
AGTGCTGCCCGTGCCTGCGCGGAGAGGCGTAAAGCGCGAGGGTGAGGACCTGTATCCCACCATGCAGCTAATGGTGC
CCAAGCGCCAGAGGCTAGAAGACGTACTGGAGAAAATGAAAGTGGATGCCGATATCCAGCCTGAGGTCAAAGTAAGA
CCTATCAAGGAAGTGGCGCCAGGTTTGGGAGTACAAACCTTCGACATCAAGATTCCCACCGAGTCCATGGAAGTGCA
GACCGAACCTGCAAAACCCACAACCACCTCAATTGAGGTGCAAACGGAACCCTGGATGCCCGCGCCCGTTGCCGCCC
CCAGCACCACTCGAAGATCACGACGAAAGTACGGCCCAGCAAGTCTGCTAATGCCCAACTATGCTCTGCACCCATCC
ATCATTCCCACTCCGGGTTACAGAGGCACTCGCTACTATCGAAACCGGAGCAACACCTCTCGCCGCCGCAAACCACC
TGCAAGTCGCACTCGCCGTCGCCGCCGCCGCAACACTGCCAGCAAATTGACTCCCGCCGCCCTGGTGCGGAGAGTGT
ACCGCGATGGTCGCGCTGAACCTCTGACGCTGCCGCGCGCGCGCTACCATCCAAGCATCACCACTTAATGACTGTTG
ACGCTGCCTCCTTGCAGATATGGCCCTCACTTGCCGCCTTCGCGTCCCCATTACTGGCTACCGAGGAAGAAACTCGC
GCCGTAGAAGGATGTTGGGGCGAGGGATGCGCCGCCACAGACGAAGGCGCGCTATCAGCAGACGATTAGGGGGTGGC
TTTTTGCCAGCTCTTATACCCATCATCGCCGCAGCGATCGGGGCGATACCAGGCATAGCTTCCGTGGCGGTTCAGGC
CTCGCAGCGCCACTAACATTGGAAAAACTTATAAATAAAAAATAGAATGGACTCTGACGCTCCTGGTCCTGTGACTA
TGTTTTTGTAGAGATGGAAGACATCAATTTTTCATCCCTGGCTCCGCGACACGGCACGAGGCCGTACATGGGCACCT
GGAGCGACATCGGCACGAGCCAACTGAACGGGGGCGCCTTCAATTGGAGCAGTATCTGGAGCGGGCTTAAAAATTTT
GGCTCGACCGTAAAAACCTATGGGAACAAAGCTTGGAACAGCAGCACAGGGCAGGCTCTGAGAAATAAGCTTAAGGA
ACAAAACTTCCAACAGAAGGTGGTCGATGGGATCGCCTCTGGTATTAACGGCGTAGTGGATCTGGCCAACCAGGCTG
TACAAAAACAGATAAACAGCCGCCTGGACCCGCCGCCCGCAACCCCTGGTGAAATGGAAGTGGAGGAAGAACTTCCT
CCGCTGGAAAAGCGGGGCGACAAGCGTCCGCGACCCGAGCTAGAGCACACGCTGGTGACGCGCGCAGACGAGCCCCC
TTCATACGAGGAGGCAGTAAAGCTCGGAATGCCCACTACCAGGCCCGTAGCTCACATGGCTACCGGGGTGATGAAAC
CTTCTGAGTTACATCGACCCGCCACCTTGGACTTGCCTCCTCCCCCTGCTTCTGCGGCGCCTGTTCCCAAACCTGTC
GCTACCAGAAAGCCCACCGCCGTACAGCCCGTTGCCGTAGCCAGACCGCGTCCTGGGGGCACACCGCGCCCGAAAGC
AAACTGGCAAAGTACTCTGAACAGCATCGTGGGTCTGGGCGTGCAGAGTGTAAAGCGCCGTCGCTGCTATTAATTAA
ATATGGAGTAGCGCTTAACTTGCTTGTCTGTGTGTATGTATCATCACCACGCCGCCGCAGCAGAGGAGAAAGGAAGA
GGTCGCGCGCCGAGGCTGAGTTGCTTTCAAGATGGCCACCCCATCGATGATGCCCCAATGGGCATACATGCACATCG
CCGGACAGGATGCTTCGGAGTACCTGAGTCCGGGTCTGGTGCAGTTCGCCCGTGCAACAGACACCTACTTCAGTATG
GGGAACAAGTTTAGAAACCCCACAGTGGCGCCCACCCACGATGTGACCACCGACCGTAGCCAGCGACTGATGCTGCG
CTTCGTGCCCGTTGACCGGGAGGACAATACATACTCTTACAAAGTGCGGTACACCCTCGCCGTGGGCGACAACAGAG
TGCTTGACATGGCCAGCACATTCTTTGACATTAGGGGGGTGCTTGATAGAGGTCCTAGCTTCAAGCCATATTCCGGC
ACAGCTTACAATTCACTGGCTCCTAAGGGCGCGCCTAACACATCTCAGTGGATAGTTACAACGGGAGAAGACAATGC
CACCACATACACATTTGGCATTGCTTCCACGAAGGGAGACAATATTACTAAGGAAGGTTTAGAAATTGGGAAAGACA
TTACTGCAGACAACAAGCCCATTTATGCCGATAAAACATATCAGCCAGAGCCTCAAGTTGGAGAAGAATCATGGACT
GATATTGATGGAACAAATGAAAAATTTGGAGGTAGAGCTCTTAAACCAGCTACTAAAATGAAGCCATGCTACGGGTC
TTTTGCAAGACCTACAAACATAAAAGGGGGCCAAGCTAAAAACAGAAAAGTAACACCAACCGAAGGAGATGTTGAAG
CTGAGGAGCCAGATATTGATATGGAATTTTTCGATGGTAGAGAAGCTGCTGACGCTTTTTCGCCTGAAATTGTGCTT
TACACGGAAAATGTCAATTTGGAAACTCCAGACAGCCATGTGGTATACAAGCCAGGAACTTCTGATGGTAACTCTCA
TGCAAATTTGGGTCAACAAGCCATGCCTAACAGACCCAATTACATTGGCTTCAGGGATAACTTTGTAGGTCTTATGT
ACTACAACAGTACTGGAAATATGGGAGTTTTGGCCGGCCAAGCATCACAACTGAATGCAGTGGTTGACTTGCAGGAC
AGAAACACTGAACTGTCATATCAGCTTTTGCTTGATTCTCTGGGAGACAGAAGCAGATACTTCAGCATGTGGAATCA
GGCTGTGGACAGCTATGATCCCGATGTTCGTATTATTGAAAATCATGGCGTCGAGGATGAACTGCCTAATTACTGTT
TTCCTCTGGATGGCATAGGACCAGGGAACAAATATCAAGGCATTAAACCTAGAGACACTGCATGGGAAAAAGATACT
AAAGTTTCTACAGCTAATGAAATAGCCATAGGCAACAATCTGGCTATGGAAATTAATATCCAAGCTAATCTTTGGAG
AAGTTTTCTGTACTCCAATGTGGCTTTGTACCTTCCAGATGTTTACAAGTACACGCCAACTAACATTACTCTGCCCG
CTAACACCAACACCTATGAGTACATGAACGGGCGAGTGGTTTCCCCATCTCTGGTCGATTCATACATCAACATTGGC
GCCAGGTGGTCTCTTGACCCAATGGACAATGTGAATCCATTTAACCACCACCGCAATGCTGGCCTACGCTACCGGTC
CATGCTTCTGGGCAATGGCCGTTATGTGCCTTTCCACATACAAGTGCCTCAAAAATTCTTTGCTGTCAAGAACCTAC
TTCTTCTACCTGGCTCCTACACCTATGAGTGGAACTTCAGAAAGGATGTGAACATGGTCCTGCAAAGTTCCCTTGGA
AATGACCTCAGAACAGATGGTGCTAACATAAGTTTCACCAGCATCAACCTCTATGCCACCTTCTTCCCCATGGCTCA
CAACACCGCTTCAACTCTTGAAGCCATGCTGCGCAACGATACCAATGATCAGTCATTCAACGACTACCTCTCTGCAG
CTAACATGCTTTACCCCATCCCTGCCAATGCAACCAACATTCCAATTTCCATCCCATCTCGCAACTGGGCAGCCTTC
AGGGGCTGGTCCTTCACCAGACTCAAAACCAAGGAGACTCCATCTCTTGGATCAGGGTTCGATCCCTACTTCGTTTA
TTCTGGATCTATTCCCTACCTGGATGGCACTTTTTACCTTAACCACACTTTCAAGAAGGTCTCCATCATGTTTGACT
CCTCAGTCAGCTGGCCTGGCAATGACAGGCTGTTGTCTCCAAATGAGTTTGAAATCAAGCGCACTGTGGATGGGGAA
GGATACAATGTGGCCCAATGCAACATGACCAAAGACTGGTTCCTGGTTCAGATGCTTGCCAACTACAACATTGGCTA
CCAGGGCTTTTACATCCCTGAGGGATACAAGGATCGCATGTACTCCTTTTTCAGAAACTTCCAGCCTATGAGCAGGC
AGGTGGTTGATGAGGTTAATTACACTGACTACAAAGCCGTCACCTTACCATATCAACACAACAACTCTGGCTTTGTA
GGATACCTTGCGCCTACTATGAGACAAGGGGAACCTTACCCAGCCAATTATCCATACCCGCTCATCGGAACTACTGC
CGTTAAAAGTGTTACCCAAAAAAAGTTCCTGTGCGACAGGACCATGTGGCGCATACCGTTCTCCAGCAACTTCATGT
CCATGGGAGCCCTTACGGACCTGGGACAGAACCTGCTCTATGCCAACTCGGCCCATGCGCTGGACATGACTTTTGAG
GTGGATCCCATGGATGAGCCCACCCTGCTTTATCTTCTTTTCGAAGTCTTCGACGTGGTCAGAGTGCACCAGCCACA
CCGCGGCGTCATCGAGGCCGTCTACCTGCGCACACCGTTCTCGGCCGGCAACGCCACCACATAAGAAGCCTCTTGCT
TCTTGCAAGCAGCAGCTGCAGCCATGTCATGCGGGTCCGGAAACGGCTCCAGCGAGCAAGAGCTCAAAGCCATCGTC
CGAGACCTGGGTTGCGGACCCTATTTCCTGGGAACCTTTGACAAGCGTTTCCCGGGGTTCATGGCCCCCGACAAGCT
CGCCTGCGCCATAGTCAACACTGCCGGACGCGAGACGGGGGGAGAGCACTGGCTGGCTTTTGGTTGGAACCCGCGCT
CCAACACCTGCTACCTTTTTGATCCTTTTGGGTTCTCGGATGAGCGACTCAAACAGATTTACCAGTTTGAGTACGAG
GGGCTCCTGCGCCGCAGTGCCCTTGCTACCAAAGACCGCTGCATCACCCTGGAAAAGTCCACCCAGAGCGTGCAGGG
CCCACGCTCAGCCGCCTGTGGACTTTTTTGCTGTATGTTCCTTCATGCCTTTGTGCACTGGCCCGACCGCCCCATGA
ACGGAAACCCCACCATGAAGTTGCTGACTGGGGTGCCCAACAGCATGCTCCAATCTCCCCAAGTGCAGCCCACCCTG
CGCCGCAACCAGGAGGCGCTATATCGCTTCCTAAACACCCACTCATCTTACTTTCGTTCTCACCGCGCACGCATCGA
AAGGGCCACCGCGTTTGACCGTATGGATATGCAATAAGTCATGTAAAACCGTGTTCAATAAAAAGCACTTTATTTTT
ACATGCACTAAGGCTCTCGTTTTTTACTCATTCGTTTTCATTATTCACTCAGAAATCAAATGGGTTCTGGCGGGAGT
CAAAGTGACCCGCGGGCAGGGATACGTTGCGGAACTGTAACCTGTTCTGCCACTTGAACTCGGGGATCACCAACTTG
GGAACTGGAATCTCGGGAAAGGTGTCTTGCCACAACTTTCTGGTCAGCTGCAGGGCGCCAAGTAGGTCAGGAGCAGA
GATCTTGAAATCACAGTTGGGACCGGCATTCTGGACACGGGAGTTGCGGTACACTGGGTTGCAACACTGGAACACCA
TCAAGGCTGGGTGTCTCACGCTTGCCAGCACGGTCGGGTCACTGATGGTAGTCACATCCAAGTCTTCAGCATTGGCC
ATCCCAAAGGGGGTCATCTTACAGGTCTGCCTGCCCATCACGGGAGCGCAGCCTGGCTTGTGGTTGCAATCGCAATG
AATGGGGATCAGCATCATCCTGGCTTGGTCGGGGGTTATCCCTGGGTACACGGCCTTCATGAAGGCTTCGTACTGCT
TGAAAGCTTCCTGAGCCTTACTTCCCTCGGTATAGAACATCCCACAGGACTTGCTGGAAAATTGATTAGTAGCACAG
TTGGCATCATTTACACAGCAGCGGGCATCGTTGTTGGCCAACTGGACCACATTTCTGCCCCAGCGGTTCTGGGTGAT
CTTGGCTCTGTCTGGGTTCTCCTTCATAGCGCGCTGTCCGTTCTCGCTCGCCACATCCATCTCGATAATGTGGTCCT
TCTGAATCATGATAGTGCCATGCAGGCATTTCACCTTGCCTTCATAATCGGTGCATCCATGAGCCCACAGAGCGCAC
CCGGTGCACTCCCAACTATTGTGGGCGATCTCAGAATAAGAATGTACCAATCCCTGCATGAATCTTCCCATCATCGC
TGTCAGGGTCTTCATGCTACTAAATGTCAGCGGGATGCCACGGTGCTCCTCGTTCACATACTGGTGGCAGATACGCT
TGTACTGCTCGTGCTGCTCTGGCATCAGCTTGAAAGAGGTTCTCAGGTCATTATCCAGCCTGTACCTCTCCATTAGC
ACAGCCATCACTTCCATGCCCTTCTCCCAGGCAGATACCAGGGGCAAGCTCAAAGGATTCCTAACAGCAATAGAAGT
AGCTCCTTTAGCTATAGGGTCATTCTTGTCGATCTTCTCAACACTTCTCTTGCCATCCTTCTCAATGATGCGCACCG
GGGGGTAGCTGAAGCCCACGGCCACCAACTGAGCCTGTTCTCTTTCTTCTTCGCTGTCGTGGCCGATGTCTTGCAGA
GGGACATGCTTGGTCTTTCTGGGCTTCTTCTTGGGAGGGATCGGGGGAGGACTGTTGCTCCGTTCCGGAGACAGGGA
TGACCGCGAAGTTTCGCTTACCAGTACCACCTGGCTCTCGATAGAAGAATCGGACCCCACGCGACGGTAGGTGTTCC
TCTTCGGGGGCAGAGGTGGAGGCGACTGAGATGGGCTGCGGTCTGGCCTTGGAAGCGGATGGCTGGCAGAGCCCATT
CCGCGTTCGGGGGTGTGCTCCCGTTGGCGGTCGCTTGACTGATTTCCTCCGCGGCTGGCCATTGTGTTCTCCTAGGC
AGAGAAACAACAGACATGGAAACTCAGCCATCACTGCCAACATCGCTGCAAGCGCCATCACACCTCGCCCCCAGCAG
CGACGAGGAGGAGAGCTTAACCACCCCACCACCCAGTCCAGCTACCACCACCTCTACCCTCGATGATGAGGAGGAGG
AGGTCGACGCAGCCCAGGAGATGCAGGCGCAGGATAATGTGAAAGCGGAAGAGATTGAGGCAGATGTCGAGCAGGAC
CCGGGCTATGTGACACCGGCGGAGCACGAGGAGGAGCTGAAACGTTTTATAGACAGAGAGGATGACGACCGCCCAGA
GCATCAAGCAGATGGCGATCACCAGGAGGCTGGCATCGGGGATCAAGTTGCCGACTACCTCACCGGGCTTGGGGGGG
AAGACGTGCTCCTCAAACATCTAGCAAGGCAGTCGAACATAGTTAAAGACGCACTACTCGACCTCACCGAAGTGCCC
ATCAGTGTGGAAGAGCTTAGCCGCGCCTACGAGCTGAACCTCTTTTCGCCTCACATACCCCCCAAGCGGCAGCCAAA
CGGCACCTGCGAGGCCAACCCTCGACTGAACTTCTATCCAGCTTTTACTGTCCCCGAAGTGCTGGCCACCTACCACA
TCTTTTTTAAGAACCAAAAGATTCCAGTCTCCTGCCGCGCCAACCGCACCCGCGCCGATGCCCTTCTCAACTTGGGT
CCGGGAGCTCGCTTACCTGATATAGCTTCCTTGGAAGAGGTTCCAAAAATCTTTGAGGGTCTGGGAAGTGATGAGAC
TCGGGCCGCAAATGCTCTGCAACAGGGAGAGAATGGCATGGATGAACATCACAGCGCTTTAGTGGAACTGGAGGGTG
ACAATGCCCGGCTTGCAGTGCTCAAGCGCAGTATCGTGGTCACCCATTTTGCCTACCCCGCTGTTAACCTGCCCCCC
AAAGTTATGAGCGCTGTTATGGACCATCTGCTCATCAAACGAGCAGGTCCACTTTCAGAAAACCAGAACATGCAGGA
TCCAGACGCCTCGGACGAGGGCAAGCCGGTAGTCAGTGACGAGCAGCTATCTCGCTGGCTGGGTACCAACTCCCCCC
GAGATTTGGAAGAGAGGCGCAAGCTTATGATGGCTGTAGTGCTAGTAACTGTGGAGCTGGAGTGTTTGCGCCGCTTT
TTCACCGACCCCGAGACCCTGCGCAAGCTAGAGGAGAACCTGCACTACACCTTTAGACATGGCTTCGTGCGGCAGGC
ATGCAAGATCTCCAACGTGGAGCTTACCAACCTGGTTTCTTACATGGGCATTTTGCATGAGAACCGGCTAGGGCAGA
GCGTCCTGCACACCACCCTTAAAGGGGAGGCCCGCCGTGACTACATCCGAGACTGTGTCTACCTCTACCTCTGCCAT
ACCTGGCAGACTGGCATGGGTGTGTGGCAACAGTGTTTGGAAGAGCAGAACCTAAAAGAGCTGGACAAGCTCTTGCA
GAGATCCCTCAAAGCCCTGTGGACAGGTTTTGATGAGCGCACCGTCGCCTCGGACCTGGCAGACATCATCTTCCCCG
AGCGTCTCAGGGTTACTCTGCGAAACGGCCTGCCAGACTTTATGAGCCAGAGCATGCTTAACAACTTTCGCTCTTTC
ATCCTGGAACGCTCCGGTATCCTGCCTGCCACCTGCTGTGCGCTGCCCTCCGACTTTGTGCCTCTCACCTACCGCGA
GTGCCCACCGCCGCTATGGAGCCACTGCTACCTGTTCCGCCTGGCCAACTACCTCTCCTACCACTCGGATGTTATAG
AGGATGTGAGCGGAGACGGTCTGCTGGAATGCCACTGCCGCTGCAATCTTTGCACACCCCACCGCTCCCTTGCCTGC
AACCCCCAGTTGCTGAGCGAGACCCAGATCATCGGCACCTTCGAGTTGCAGGGTCCCAGCAGTGAAGGCGAGGGGTC
TTCTCCGGGGCAGAGTCTGAAACTGACACCGGGGCTGTGGACCTCCGCCTACCTGCGCAAGTTTCATCCCGAGGATT
ACCACCCCTATGAGATCAGGTTCTATGAGGACCAGTCACATCCTCCCAAAGTCGAGCTCTCAGCCTGCGTCATCACC
CAGGGAGCAATTCTGGCCCAATTGCAAGCCATCCAAAAATCCCGCCAAGAATTTCTACTGAAAAAGGGAAGCGGGGT
CTACCTTGACCCCCAGACCGGTGAGGAGCTCAACACAAGGTTCCCCCAGGATGTCCCATCGCCGAGGAAGCAAGAAG
CTGAAGGTGCAGCTGACGCCCCCAGAGGATATGGAGGAAGACTGGGACAGTCAGGCAGAGGAGGAGATGGAAGATTG
GGACAGCCAGGCAGAGGAGGTGGACAGCCTGGAGGAAGACAGTTTGGAGGAGGAAGACGAGGAGGCAGAGGAGGTGG
AAGAAGCAACCGCCGCCAAACAGTTGTCATCGGCGGCGGAGACAAGCAAGTCCCCAGACAGCAGCACGGCTACCATC
TCCGCTCCGGGTCGGGGGGTCCAGCGGCGGCCCAACAGTAGATGGGACGAGACCGGGCGATTCCCAAACCCGACCAC
CGCTTCCAAGACCGGTAAGAAGGAGCGACAGGGATACAAGTCCTGGCGTGGACATAAAAACGCTATCATCTCCTGCT
TGCATGAATGCGGGGGCAACATATCCTTCACCCGGCGATACCTGCTCTTCCACCACGGTGTGAACTTCCCCCGCAAT
ATCTTGCATTACTACCGTCACCTCCACAGCCCCTACTGCAGTCAGCAAGTCCCGGCAACCCCGACAGAAAAAGACAG
CAGCGACAACGGTGACCAGAAAACCAGCAGTTAGAAAATCTACAACAAGTGCAGCAGGAGGAGGACTGAGGATCACA
GCGAACGAGCCAGCGCAGACCAGAGAGCTGAGGAACCGGATCTTTCCAACCCTCTATGCCATCTTCCAGCAGAGTCG
GGGGCAAGAGCAGGAACTGAAAGTAAAAAACCGATCTCTGCGCTCGCTCACCAGAAGTTGTTTGTATCACAAGAGCG
AAGACCAACTTCAGCGCACTCTCGAGGACGCCGAGGCTCTCTTCAACAAGTACTGCGCGCTGACTCTTAAAGAGTAG
CCCTTGCCCGCGCTTATTCGAAAACGGCGGGAATCACGTCACCCTTGGCACCTGTCCTTTGCCCTAGTCATGAGTAA
AGAGATTCCCACGCCTTACATGTGGAGCTATCAGCCCCAAATGGGGTTGGCAGCAGGCGCCTCCCAGGACTACTCCA
CCCGCATGAATTGGCTTAGCGCCGGGCCCTCAATGATATCACGGGTTAATGATATACGAGCTTATCGAAACCAGTTA
CTCCTAGAACAGTCAGCTCTCACCACCACACCCCGCCAACACCTTAATCCCCGAAATTGGCCCGCCGCCCTGGTGTA
CCAGGAAACTCCCGCTCCCACCACCGTACTACTTCCTCGAGACGCCCAGGCCGAAGTTCAGATGACTAACGCAGGTG
TACAGCTGGCGGGCGGTTCCGCCCTATGTCGTCACCGACCTCAACAGAGTATAAAACGCCTGGTGATCAGAGGCCGA
GGTATCCAGCTCAACGACGAGTCGGTTAGCTCTTCGCTTGGTCTGCGACCAGACGGAGTCTTCCAGATCGCCGGCTG
TGGGAGATCTTCCTTCACCCCTCGTCAGGCTGTACTGACTTTGGAGAGTTCGTCCTCGCAGCCCCGCTCGGGCGGCA
TCGGAACTCTCCAGTTCGTGGAGGAGTTTACTCCCTCTGTCTACTTCAACCCCTTCTCCGGCTCTCCTGGCCAGTAC
CCAGACGAGTTCATACCGAACTTCGACGCAATCAGCGAGTCAGTGGATGGCTATGATTGATGTCTAATGGTGGCGCG
GCTGAGCTAGCTCGACTGCGACACCTAGACCACTGCCGCCGCTTTCGCTGCTTCGCCCGGGAACTCACCGAGTTCAT
CTACTTCGAACTCCCCGAGGAGCACCCTCAGGGTCCGGCCCACGGAGTGCGGATTACCATCGAAGGGGGAATAGACT
CTCGCCTGCATCGAATCTTCTCCCAGCGACCCGTGCTGATTGAGCGCGACCAGGGAAATACAACCATCTCCATTTAC
TGCATCTGTAACCACCCCGGATTGCATGAAAGCCTTTGCTGTCTTGTTTGTGCTGAGTTTAATAAAAACTGAGTTAA
GACCCTCCTACGGACTACCGCTTCTTCAATCAGGACTTTACAACACCAACCAGATCTTCCAGAAGACCCAGACCCTT
CCTCCTCTGATCCAGGACTCTAACTCTACCTTACCAGCACCATCCACTACTAACCTTCCCGAAACTAACAAGCTTGG
ATCTCATCTGCAACACCGCCTTTCACGAAGCCTTCTTTCTGCCAATACTACCACTCCCAAAACCGGAGGTGAGCTCC
GCGGTCTCCCTACTGACGACCCCTGGGTGGTAGCGGGTTTTGTAACGTTAGGAGTAGTTGCGGGTGGGCTTGTGCTA
ATCCTTTGCTACCTATACATACCTTGCTGTGCATATTTAGTCATATTGCGCTGTTGGTTTAAAAAATGGGGGCCATA
TTAGTCGTGCTTGCTTTACTTTCGCTTTTGGGTCTGGGCTCTGCTAATCTCAATCCTCTTGATCACGATCCATGTCT
AGACTTCGACCCAGAAAACTGCACACTTACTTTTGCACCCGACACAAGCCGTCTCTGTGGAGTTCTTATTAAGTGCG
GATGGGACTGCAGGTCCGTTGAAATTACACATAATAATAAAACATGGAACAATACCTTATCCACCACATGGGAGCCA
GGAGTTCCCGAGTGGTATACTGTCTCTGTCCGAGGTCCTGACGGTTCCATCCGCATTAGTAACAACACTTTTATTTT
TTCTGAAATGTGCGATCTGGCCATGTTCATGAGCAGACAGTATGACCTATGGCCTCCCAGCAAAGAGAACATTGTGG
CATTTTCCATTGCTTATTGCTTGGTAACATGCATCATCACTGCTATCATTTGTGTGTGCATACACTTGCTTATAGTT
ATTCGCCCTAGACAAAGCAATAAGGAAAAAGAGAAAATGCCTTAACCTTTTTACTCATACCTTTTCTTTACAGCATG
GCTTTTGTTACAGCTCTAATTATTGCCAACATTGTCACTGTCGCTCACGGGCAAACAATTATCCATATTACCTTAGG
ACATAATCACACCCTTGTAGGGCCCCCAATTACTTCAGAGGTTATTTGGACCAAACTTGGAAGTGTTGATTATTTTG
ATATAATTTGCAACAAAACTAAACCAATATTTGTAATCTGTAACAGACAAAATCTCACGTTAATTAATGTTAGCAAA
ATTTATAACGGTTACTATTATGGTTATGACAGATCCAGTAGTCAATATAAAAATTACTTAGTTCGCATAACTCAGCC
CAAATTAACAGTGCCCACTATGACAATAATTAAAATGGCTAATAAAGCATTAGAAAATTTTACATCACCAACAACGC
CCAATGAAAAAAACATTCCAAATTCAATGATTGCAATTATTGCGGCGGTGGCATTGGGAATGGCACTAATAATAATA
TGCATGTTCCTATATGCTTGTTGCTATAAAAAGTTTCAACATAAACAGGATCCACTACTAAATTTTAACATTTAATT
TTTTATACAGATGTTTTCCACTACAATTTTTATCATTACTAGCCTTGCAGCTGTAACTTATGGCCGTTCACACCTAA
CTCTACCTGTTGGCTCAACATGTACACTACAAGGACCCCAACAAGGCTATGTCACTTGGTGGAGAATATATGATAAT
GGAGGGTTCGCTAGACCATGTGATCAGCCTGGTACAAAATTTTCATGCAACGGAAGAGACTTGACCATAATTAACAT
AACATCAAATGAGCAAGGCTTCTATTATGGAACCAACTATAAAGATAGTTTAGATTACAACATTATTGTAGTGCCAG
CCACCACTTCTGCTCCCCGCAAAACCACTTTCTCTAGCAGCAGTGCCAAAGCAAGCACAATTCCTAAAACAGCTTCT
GCTATGTTAAAGCTTCAAAAAATCGCTTTAAATAATTCCACAGCCGCTCCCAATACAATTCCTAAATCAACAATTGG
CATCATTACTGCCGTGGTAGTGGGATTAATTATTATATTTTTGTGCATAATGTACTATGCCTGCTGCTATAGAAAAC
ATGAACAAAAAGGTGATGCATTACTAAATTTTGACATTTAATTTTTTATAGAATTATGATATTGTTTCAATCAAATA
CCACTAACACTATCAATGTGCAGACTACTTTAAATCATGACATGGAAAACCACACTACCTCCTATGCATACACAAAC
ATTCAGCCTAAATACGCTATGCAATAGAAATTCTAAAAGACGTCCCATCTATTCTCCTATGATTAGTCGTCCCCATA
TGGCTTTGAATGAAATCTAAGATCTTTTTTTTTTTTCTCTTACAGTATGGTGAACACCAATCATGATCCCTAGAAAT
TTCTTCTTCACCATACTCATCTGTGCTTTCAATGTCTGTGCTACTTTCACAGCAGTAGCCACTGCAAGCCCAGACTG
TATAGGACCATTTGCTTCCTATGCACTTTTTGCCTTCGTTACTTGCATCTGCGTGTGTAGCATAGTCTGCCTGGTTA
TTAATTTTTTCCAACTGGTAGACTGGATCTTTGTACGAATTGCCTACCTACGTCACCATCCCGAATACCGCAATCAA
AATGTTGCGGCACTTCTTAGGCTTATTTAAAACCATGCAGGCTATGCTACCAGTCATTTTAATTCTGCTACTACCCT
GCATTGCCCTAGCTTCCACCGCCACTCGCGCTACACCTGAACAACTTAGAAAATGCAAATTTCAACAACCATGGTCA
TTTCTTGATTGCTACCATGAAAAATCTGATTTCCCCACATACTGGATAGTGATTGTTGGAATAATTAACATACTTTC
ATGTACCTTTTTCTCAATCACAATATACCCCACATTTAATTTTGGGTGGAATTCTCCCAATGCACTGGGTTACCCAC
AAGAACCAGATGAACATATCCCACTACAACACATACAACAACCACTAGCACTGGTAGAGTATGAAAATGAGCCACAA
CCTTCACTACCTCCTGCCATTAGTTACTTCAACCTAACCGGCGGAGATGACTGAAATACTCACCACCTCCAATTCCG
CCGAGGATCTGCTTGATATGGACGGCCGCGTCTCAGAACAGCGACTCGCCCAACTACGCATCCGCCAGCAGCAGGAA
CGCGTGACCAAAGAGCTCAGAGATGTCATCCAAATTCACCAATGCAAAAAAGGCATATTTTGCTTGGTAAAACAAGC
CAAGATATCCTACGAGATCACCGCTACTGACCATCGCCTCTCTTACGAACTTGGCCCCCAACGACAAAAATTTACAT
GCATGGTGGGAATCACCCCTATAGTTATCACTCAGCAAAGTGGAGATACTAAGGGGTGCATTCACTGCTCTTGCGAT
TCCATCGAGTGCACCTACACCCTGCTAAAGACCCTATGCGGCCTAAGAGACCTGCTACCCATGAATTAAAAATTAAT
AAAAAATCACTTACTTGAAATCAGCAATAAGGTCTCTGTTGAAATTTTCTCCCAGCAGCACCTCACTTCCCTCTTCC
CAACTCTGGTATTCTAAACCCCGTTCAGCGGCATACTTTCTCCATACTTTAAAGGGGATGTCAAATTTTAACTCCTG
TCCTGTACCCACAATCTTCATGTCTTTCTTCCCAGATGACCAAGAGAGTCCGGCTCAGTGATTCCTTCAACCCTGTC
TACCCCTATGAAGATGAAAGCACCTCCCAACACCCCTTTATAAACCCAGGGTTTATTTCCCCAAATGGCTTTACACA
AAGCCCAGACGGAGTTCTTACTTTAAAATGTTTAACCCCACTAACAACCACAGGCGGGTCTCTACAGTTAAAAGTGG
GAGGGGGTCTTACAATAGATGACACCGACGGTTTTTTGAAAGAAAACATAAGTGCCACCACACCACTCGTTAAGACT
GGTCACTCTATAGGTTTGTCGCTAGGACCCGGATTAGGAACAAATGAAAACAAACTTTGTGCCAAATTGGGAGAAGG
ACTTACATTCAATTCCAACAACATTTGCATTAATGACAATATTAACACCCTATGGACAGGAGTTAACCCCACCAGAG
CCAACTGTCAAATAATGGCCTCCAGTGAATCTAATGATTGCAAATTAATTCTAACACTAGTTAAAACTGGAGCCCTC
GTCACTGCATTTGTTTATGTTATAGGAGTATCTAACGATTTTAATATGCTAACTACACATAAAAATATAAATTTCAC
TGCAGAGCTGTTTTTTGATTCTACTGGTAATTTATTAACTAGCCTTTCATCCCTAAAAACTCCACTTAATCATAAAT
CAGGGCAAAACATGGCTACTGGTGCCCTTACTAATGCTAAAGGTTTCATGCCCAGCACAACTGCCTATCCTTTCAAT
GTTAATTCCAGAGAAAAAGAAAACTACATTTACGGAACTTGTTACTACACAGCTAGTGATCACACTGCTTTTCCCAT
TGACATATCTGTCATGCTTAACCAAAGAGCATTAAATAATGAGACATCATATTGTATTCGTGTAACTTGGTCCTGGA
ATACAGGAGTTGCCCCAGAAGTGCAAACCTCTGCTACTACCCTAGTCACCTCTCCATTTACCTTTTACTACATTAGA
GAAGACGACTGACAAATAAAGTTTAACTTGTTTATTTAAAATCAATTCATAAAATTCGAGTAGTTATTTTGCCTCCC
CCTTCCCATTTAACAGAATACACCAATCTCTCCCCACGCACAGCTTTAAACATTTGGATACCATTACAGATAGACAT
AGTTTTAGATTCCACATTCCAAACAGTTTCAAAGCGAGCCAATCTGGGGTCAGTGATACATAAAAATGCATCGGGAT
AGTCTTTTAAAGCGCTTTCACAGTCCAACTGCTGCGGATGCGACTCCGGAGTCTGGATCACGGTCATCTGGAAGAAG
AACGATGGGAATCATAATCCGAAAACGGAATCGGGCGATTGTGTCTCATCAAACCCACAAGCAGCCGCTGTCTGCGT
CGCTCCGTGCGACTGCTGTTTATAGGATCGGGATCCACAGTGTCCTGAAGCATGATTTTAATAGCCCTTAACATTAA
CTTTCTGGTGCGGTGCGCGCAGCAACGCATTCTGATTTCACTTAGATTACTACAGTAGGTACAGCACATTATCACAA
TATTGTTTAATAAACCATAATTAAAAGCGCTCCAGCCAAAACTCATATCAGATATAATCGCCCCTGCATGACCATCA
TACCAAATTTTAATATAAATTAAATGTCGTTCCCTCAAAAACACACTACCCACATACATAATCTCTTTTGGCATGTG
CATATTAACAATCTGTCTGTACCATGGACAACGTTGGTTAATCATGCAACCCAATATAACCTTCCGAAACCACACTG
CCAACACCGCTCCCCCAGCCATGCATTGAAGTGAACCCTGCCGATTACAATGACAATGAAGAACCCAATTCTCTCGA
CCATGAATCACTTGAGAATAAAAAATATCTATAGTAGCACAACAAAGACATAAATGCATGCATCTTCTCATAATTCT
TAACTCCTCGGGATTTAGAAACATATCCCAAGGAATGGGAAACTCTTGCAGAACAGTAAAGCTGGCAGAACAAGGAA
GACCACGAACACAACTTACACTATGCATAGTCATAGTATCACAATCTGGCAACAGCGGGTGGTCTTCAGTCATAGAA
GCTCGGGTTTCATTTTCCTCACATCGTGGTAACTGGGCTCTGGTGTAAGGGTGATGTCTGGCGCATGATGTCGAGCG
TGCGCGCAACCTTGTCATAATGGAGTTGCTTCCTGACATTCTCGTATTTTGTATAGCAAAACGCGGCCCTGGCACAA
CACACTCTTCTTCGTCTTCTATCCTGCCGCTTAGTGTGTTCCGTCTGATAATTCAAGTACAGCCACACTCTTAAGTT
GGTCAAAAGAATGCTGGCTTCAGTTGTAATCAAAACTCCATCATATTTAATTGTTCTAAGGAAATCATCCACGGTAG
CATATGCAAATCCCAACCAAGCAATGCAACTGGATTGCGTTTCAAGCAGCAGAGGAGAGGGAAGAGACGGAAGAATC
ATGTTAATTTTTATTCCAAACGATCTCGCAGTACTTCAAATTGTAGATCGCGCAGATGGCATCTATCGCCCCCACTG
TGTTGGTGAAAAAGCACAGCTAAATCAAAAGAAATGCGATTTTCAAGGTGCTCAACGGTGGCTTCCAACAAAGCCTC
CACGCGCACATCCAAAAACAAAAGAATACCAAAAGAAGGAGCATTTTCTAACTCCTCAAACATCATATTACATTCCT
GCACCATTCCCAGATAATTTTCAGCTTTCCAGCCTTGAATTATTCGTGTCAGTTCTTGTGGTAAATCCAAACCACAC
ATTACAAACAGGTCCCGGAGGGCGCCCTCCACCACCATTCTTAAACACACCCTCATAATGTCAAAATATCTTGCTCC
TGTGTCACCTGTAGCAAATTAAGAATGGCATCATCAATTGACATGCCCTTGGCTCTAAGTTCTTCTCTAAGTTCTAG
TTGTAAATACTCTTTCATATTATCACCAAACTGCTTAGCCAGAAGCCCCCCGGGAACAATAGCAGGGGACGCTACAG
TGCAGTACAAGCGCAGACCTCCCCAATTGGCTCCAGCAAAAACAAGATTAGAATAAGCATACTGGGAACCACCAGTA
ATATCATCAAAGTTGCTGGAAATATAATCAGGCAGAGTTTCTTGTAAAAATTGAATAAAAGAAAAATTTTCCAAAGA
AACATTCAAAACCTCTGGGATGCAAATGCAATAGGTTACCGCGCTGCGCTCCAACATTATTAGTTTTGAATTAGTCT
GTAAAATAAAAGAAACAAGCGTCATATCATAGTAGCCTGTCGAACAGGTGGATAAATCAGTCTTTCCATTACAAGAC
AAGCCACAGGGTCTCCAGCTCGACCCTCGTAAAACCTGTCATCGTGATTAAACAACAGCACCGAAAGTTCCTCGCGG
TGGCCAGCATGAATAATTCTTGATGAAGCATATAATCCAGACATGTTAGCATCAGTTAAAGAAAAAAAACAGCCAAC
ATAGCCTCTGGGTATAATTATGCTTAATCTTAAGTATAGCAAAGCCACCCCTCGCGGATACAAAGTAAAAGGCACAG
GAGAATAAAAAATATAATTATTTCTCTGCTGCTGTTCAGGCAACGTTGCCCCCGGTCCCTCTAAATACACATACAAA
GCCTCATCAGCCATGGCTTACCAGACAAAGTATAGCGGGCGCACAAAGCACAAGCTCTAAAGAAGCTCTAAAGACGC
TCTCCAACCTCTCCACAATATATACACAAGCCCTAAACTGACGTAATGGGAGTAAAGTGTAAAAAATCCCGCCAAGC
CCAACACACACCCCGAAACTGCGTCAGCAGGGAAAAGTACAGTTTCACTTCCGCAAACCCAACAAGCGTAGCTTCCT
CTTTCTCACGGTACGTCACATCCGATTAACTTGCAACGTCATTTTCCCACGGCCGCCCCGCCCATTTTAGCCGTTAA
CCCCACAGCCAATCACCACACAGCGCGCACTTTTTTAAATTACCTCATTTACATATTGGCACCATTCCATCTATAAG
GTATATTATATAGAGAG

GenBank Accession No. AP_000564 (SEQ ID NO: 217)

MTKRVRLSDSFNPVYPYEDESTSQHPFINPGFISPNGFTQSPDGVLTLKC
LTPLITTGGSLQLKVGGGLTIDDTDGFLKENISATTPLVKTGHSIGLSLG
PGLGTNENKLCAKLGEGLTENSNNICINDNINTLWTGVNPTRANCQIMAS
SESNDCKLILTLVKTGALVTAFVYVIGVSNDFNMLTTHKNINFTAELFFD
STGNLLTSLSSLKTPLNHKSGQNMATGALTNAKGFMPSTTAYPFNVNSRE
KENYIYGTCYYTASDHTAFPIDISVMLNQRALNNETSYCIRVTWSWNTGV
APEVQTSATTLVTSPFTFYYIREDD

GenBank Accession No. AP 000543 (SEQ ID NO: 218)

MRRRAVLGGAVVYPEGPPPSYESVMQQQAAMIQPPLEVPFVPPRYLAPTE
GRNSIRYSELSPLYDTTKLYLVDNKSADIASLNYQNDHSNFLTTVVQNND
FTPTEASTQTINFDERSRWGGHLKTIMHTNMPNVNEYMFSNKFKARVMVS
RKAPEGVTVNDTYDHKEDILKYEWFEFILPEGNFSATMTIDLMNNAIIDN
YLEIGRQNGVLESDIGVKFDTRNFRLGWDPETKLIMPGVYTYEAFHPDIV
LLPGCGVDFTESRLSNLLGIRKRHPFQEGFKIMYEDLEGGNIPALLDVTA
YEESKKDTTTETTTLAVAEETSEDDNITRGDTYITEKHKREAAAAEVKKE
LKIQPLEKDSKSRSYNVLEDKINTAYRSWYLSYNYGNPKKGIRSWTLLTT
SDVTCGAEQVYWSLPDMMQDPVTFRSTRQVNNYPVVGAELMPVFSKSFYN
EQAVYSQQLRQATSLTHVENRFPENQILIRPPAPTITTVSENVPALTDHG
TLPLRSSIRGVQRVTVTDARRRTCPYVYKALGIVAPRVLSSRTF

GenBank Accession No. AP_000548 (SEQ ID NO: 219)

MATPSMMPQWAYMHIAGQDASEYLSPGLVQFARATDTYFSMGNKFRNPTV
APTHDVTTDRSQRLMLRFVPVDREDNTYSYKVRYTLAVGDNRVLDMASTF
FDIRGVLDRGPSFKPYSGTAYNSLAPKGAPNTSQWIVTTGEDNATTYTFG
IASTKGDNITKEGLEIGKDITADNKPIYADKTYQPEPQVGEESWTDIDGT
NEKFGGRALKPATKMKPCYGSFARPTNIKGGQAKNRKVTPTEGDVEAEEP
DIDMEFFDGREAADAFSPEIVLYTENVNLETPDSHVVYKPGTSDGNSHAN
LGQQAMPNRPNYIGFRDNFVGLMYYNSTGNMGVLAGQASQLNAVVDLQDR
NTELSYQLLLDSLGDRSRYFSMWNQAVDSYDPDVRIIENHGVEDELPNYC
FPLDGIGPGNKYQGIKPRDTAWEKDTKVSTANEIAIGNNLAMEINIQANL
WRSFLYSNVALYLPDVYKYTPTNITLPANTNTYEYMNGRVVSPSLVDSYI
NIGARWSLDPMDNVNPFNHHRNAGLRYRSMLLGNGRYVPFHIQVPQKFFA
VKNLLLLPGSYTYEWNFRKDVNMVLQSSLGNDLRTDGANISFTSINLYAT
FFPMAHNTASTLEAMLRNDTNDQSENDYLSAANMLYPIPANATNIPISIP
SRNWAAFRGWSFTRLKTKETPSLGSGFDPYFVYSGSIPYLDGTFYLNHTF
KKVSIMFDSSVSWPGNDRLLSPNEFEIKRTVDGEGYNVAQCNMTKDWFLV
QMLANYNIGYQGFYIPEGYKDRMYSFFRNFQPMSRQVVDEVNYTDYKAVT
LPYQHNNSGFVGYLAPTMRQGEPYPANYPYPLIGTTAVKSVTQKKFLCDR
TMWRIPFSSNFMSMGALTDLGQNLLYANSAHALDMTFEVDPMDEPTLLYL
LFEVEDVVRVHQPHRGVIEAVYLRTPFSAGNATT

GenBank Accession No. NC_011202 (SEQ ID NO: 201)

CATCATCAATAATATACCTTATAGATGGAATGGTGCCAATATGTAAATGAGGTGATTTTAAAAAGTGTGGATCGTGT
GGTGATTGGCTGTGGGGTTAACGGCTAAAAGGGGCGGTGCGACCGTGGGAAAATGACGTTTTGTGGGGGTGGAGTTT
TTTTGCAAGTIGTCGCGGGAAATGTGACGCATAAAAAGGCTTTTTTCTCACGGAACTACTTAGTTTTCCCACGGTAT
TTAACAGGAAATGAGGTAGTTTTGACCGGATGCAAGTGAAAATTGTTGATTTTCGCGCGAAAACTGAATGAGGAAGT
GTTTTTCTGAATAATGTGGTATTTATGGCAGGGTGGAGTATTTGTTCAGGGCCAGGTAGACTTTGACCCATTACGTG
GAGGTTTCGATTACCGTGTTTTTTACCTGAATTTCCGCGTACCGTGTCAAAGTCTTCTGTTTTTACGTAGGTGTCAG
CTGATCGCTAGGGTATTTATACCTCAGGGTTTGTGTCAAGAGGCCACTCTTGAGTGCCAGCGAGAAGAGTTTTCTCC
TCTGCGCCGGCAGTTTAATAATAAAAAAATGAGAGATTTGCGATTTCTGCCTCAGGAAATAATCTCTGCTGAGACTG
GAAATGAAATATTGGAGCTTGTGGTGCACGCCCTGATGGGAGACGATCCGGAGCCACCTGTGCAGCTTTTTGAGCCT
CCTACGCTTCAGGAACTGTATGATTTAGAGGTAGAGGGATCGGAGGATTCTAATGAGGAAGCTGTAAATGGCTTTTT
TACCGATTCTATGCTTTTAGCTGCTAATGAAGGGTTAGAATTAGATCCGCCTTTGGACACTTTTGATACTCCAGGGG
TAATTGTGGAAAGCGGTACAGGTGTAAGAAAATTACCTGATTTGAGTTCCGTGGACTGTGATTTGCACTGCTATGAA
GACGGGTTTCCTCCGAGTGATGAGGAGGACCATGAAAAGGAGCAGTCCATGCAGACTGCAGCGGGTGAGGGAGTGAA
GGCTGCCAATGTTGGTTTTCAGTTGGATTGCCCGGAGCTTCCTGGACATGGCTGTAAGTCTTGTGAATTTCACAGGA
AAAATACTGGAGTAAAGGAACTGTTATGTTCGCTTTGTTATATGAGAACGCACTGCCACTTTATTTACAGTAAGTGT
GTTTAAGTTAAAATTTAAAGGAATATGCTGTTTTTCACATGTATATTGAGTGTGAGTTTTGTGCTTCTTATTATAGG
TCCTGTGTCTGATGCTGATGAATCACCATCTCCTGATTCTACTACCTCACCTCCTGAGATTCAAGCACCTGTTCCTG
TGGACGTGCGCAAGCCCATTCCTGTGAAGCTTAAGCCTGGGAAACGTCCAGCAGTGGAAAAACTTGAGGACTTGTTA
CAGGGTGGGGACGGACCTTTGGACTTGAGTACACGGAAACGTCCAAGACAATAAGTGTTCCATATCCGTGTTTACTT
AAGGTGACGTCAATATTTGTGTGACAGTGCAATGTAATAAAAATATGTTAACTGTTCACTGGTTTTTATTGCTTTTT
GGGCGGGGACTCAGGTATATAAGTAGAAGCAGACCTGTGTGGTTAGCTCATAGGAGCTGGCTTTCATCCATGGAGGT
TTGGGCCATTTTGGAAGACCTTAGGAAGACTAGGCAACTGTTAGAGAACGCTTCGGACGGAGTCTCCGGTTTTTGGA
GATTCTGGTTCGCTAGTGAATTAGCTAGGGTAGTTTTTAGGATAAAACAGGACTATAACCAAGAATTTGAAAAGTTG
TTGGTAGATTGCCCAGGACTTTTTGAAGCTCTTAATTTGGGCCATCAGGTTCACTTTAAAGAAAAAGTTTTATCAGT
TTTAGACTTTTCAACCCCAGGTAGAACTGCTGCTGCTGTGGCTTTTCTTACTTTTATATTAGATAAATGGATCCCGC
AGACTCATTTCAGCAGGGGATACGTTTTGGATTTCATAGCCACAGCATTGTGGAGAACATGGAAGGTTCGCAAGATG
AGGACAATCTTAGGTTACTGGCCAGTGCAGCCTTTGGGTGTAGCGGGAATCCTGAGGCATCCACCGGTCATGCCAGC
GGTTCTGGAGGAGGAACAGCAAGAGGACAACCCGAGAGCCGGCCTGGACCCTCCAGTGGAGGAGGCGGAGTAGCTGA
CTTGTCTCCTGAACTGCAACGGGTGCTTACTGGATCTACGTCCACTGGACGGGATAGGGGCGTTAAGAGGGAGAGGG
CATCTAGTGGTACTGATGCTAGATCTGAGTTGGCTTTAAGTTTAATGAGTCGCAGACGTCCTGAAACCATTIGGTGG
CATGAGGTTCAGAAAGAGGGAAGGGATGAAGTTTCTGTATTGCAGGAGAAATATTCACTGGAACAGGTGAAAACATG
TTGGTTGGAGCCTGAGGATGATTGGGAGGTGGCCATTAAAAATTATGCCAAGATAGCTTTGAGGCCTGATAAACAGT
ATAAGATTACTAGACGGATTAATATCCGGAATGCTTGTTACATATCTGGAAATGGGGCTGAGGTGGTAATAGATACT
CAAGACAAGGCAGTTATTAGATGCTGCATGATGGATATGTGGCCTGGGGTAGTCGGTATGGAAGCAGTAACTTTTGT
AAATGTTAAGTTTAGGGGAGATGGTTATAATGGAATAGTGTTTATGGCCAATACCAAACTTATATTGCATGGTTGTA
GCTTTTTTGGTTTCAACAATACCTGTGTAGATGCCTGGGGACAGGTTAGTGTACGGGGATGTAGTTTCTATGCGTGT
TGGATTGCCACAGCTGGCAGAACCAAGAGTCAATTGTCTCTGAAGAAATGCATATTTCAAAGATGTAACCTGGGCAT
TCTGAATGAAGGCGAAGCAAGGGTCCGCCACTGCGCTTCTACAGATACTGGATGTTTTATTTTGATTAAGGGAAATG
CCAGCGTAAAGCATAACATGATTTGCGGTGCTTCCGATGAGAGGCCTTATCAAATGCTCACTTGTGCTGGTGGGCAT
TGTAATATGCTGGCTACTGTGCATATTGTTTCCCATCAACGCAAAAAATGGCCTGTTTTTGATCACAATGTGATGAC
GAAGTGTACCATGCATGCAGGTGGGCGTAGAGGAATGTTTATGCCTTACCAGTGTAACATGAATCATGTGAAAGTGT
TGTTGGAACCAGATGCCTTTTCCAGAATGAGCCTAACAGGAATTTTTGACATGAACATGCAAATCTGGAAGATCCTG
AGGTATGATGATACGAGATCGAGGGTACGCGCATGCGAATGCGGAGGCAAGCATGCCAGGTTCCAGCCGGTGTGTGT
AGATGTGACTGAAGATCTCAGACCGGATCATTTGGTTATTGCCCGCACTGGAGCAGAGTTCGGATCCAGTGGAGAAG
AAACTGACTAAGGTGAGTATTGGGAAAACTTTGGGGTGGGATTTTCAGATGGACAGATTGAGTAAAAATTTGTTTTT
TCTGTCTTGCAGCTGTCATGAGTGGAAACGCTTCTTTTAAGGGGGGAGTCTTCAGCCCTTATCTGACAGGGCGTCTC
CCATCCTGGGCAGGAGTTCGTCAGAATGTTATGGGATCTACTGTGGATGGAAGACCCGTCCAACCCGCCAATTCTTC
AACGCTGACCTATGCTACTTTAAGTTCTTCACCTTTGGACGCAGCTGCAGCTGCCGCCGCCGCTTCTGTTGCCGCTA
ACACTGTGCTTGGAATGGGTTACTATGGAAGCATCATGGCTAATTCCACTTCCTCTAATAACCCTTCTACCCTGACT
CAGGACAAGTTACTTGTCCTTTTGGCCCAGCTGGAGGCTTTGACCCAACGTCTGGGTGAACTTTCTCAGCAGGTGGT
CGAGTTGCGAGTACAAACTGAGTCTGCTGTCGGCACGGCAAAGTCTAAATAAAAAAATCCCAGAATCAATGAATAAA
TAAACAAGCTTGTTGTTGATTTAAAATCAAGTGTTTTTATTTCATTTTTCGCGCACGGTATGCCCTAGACCACCGAT
CTCTATCATTGAGAACTCGGTGGATTTTTTCCAGGATCCTATAGAGGTGGGATTGAATGTTTAGATACATGGGCATT
AGGCCGTCTTTGGGGTGGAGATAGCTCCATTGAAGGGATTCATGCTCCGGGGTAGTGTTGTAAATCACCCAGTCATA
ACAAGGTCGCAGTGCATGGTGTTGCACAATATCTTTTAGAAGTAGGCTGATTGCCACAGATAAGCCCTTGGTGTAGG
TGTTTACAAACCGGTTGAGCTGGGATGGGTGCATTCGGGGTGAAATTATGTGCATTTTGGATTGGATTTTTAAGTTG
GCAATATTGCCGCCAAGATCCCGTCTTGGGTTCATGTTATGAAGGACCACCAAGACGGTGTATCCGGTACATTTAGG
AAATTTATCGTGCAGCTTGGATGGAAAAGCGTGGAAAAATTTGGAGACACCCTTGTGTCCTCCAAGATTTTCCATGC
ACTCATCCATGATAATAGCAATGGGGCCGTGGGCAGCGGCGCGGGCAAACACGTTCCGTGGGTCTGACACATCATAG
TTATGTTCCTGAGTTAAATCATCATAAGCCATTTTAATGAATTTGGGGCGGAGAGTACCAGATTGGGGTATGAATGT
TCCTTCGGGCCCCGGAGCATAGTTCCCCTCACAGATTTGCATTTCCCAAGCTTTCAGTTCCGAGGGTGGAATCATGT
CCACCTGGGGGGCTATGAAAAACACCGTTTCTGGGGCGGGGGTGATTAATTGTGATGATAGCAAATTTCTGAGCAAT
TGAGATTTGCCACATCCGGTGGGGCCATAAATGATTCCGATTACGGGTTGCAGGTGGTAGTTTAGGGAACGGCAACT
GCCGTCTTCTCGAAGCAAGGGGGCCACCTCGTTCATCATTTCCCTTACATGCATATTTTCCCGCACCAAATCCATTA
GGAGGCGCTCTCCTCCTAGTGATAGAAGTTCTTGTAGTGAGGAAAAGTTTTTCAGCGGTTTCAGACCGTCAGCCATG
GGCATTTTGGAGAGAGTTTGCTGCAAAAGTTCTAGTCTGTTCCACAGTTCAGTGATGTGTTCTATGGCATCTCGATC
CAGCAGACCTCCTCGTTTCGCGGGTTTGGACGGCTCCTGGAATAGGGTATGAGACGATGGGCGTCCAGCGCTGCCAG
GGTTCGGTCCTTCCAGGGTCTCAGTGTTCGAGTCAGGGTTGTTTCCGTCACAGTGAAGGGGTGTGCGCCTGCTTGGG
CGCTTGCCAGGGTGCGCTTCAGACTCATCCTGCTGGTCGAAAACTTCTGTCGCTTGGCGCCCTGTATGTCGGCCAAG
TAGCAGTTTACCATGAGTTCGTAGTTGAGCGCCTCGGCTGCGTGGCCTTTGGCGCGGAGCTTACCTTTGGAAGTTTT
CTTGCATACCGGGCAGTATAGGCATTTCAGCGCATACAACTTGGGCGCAAGGAAAACGGATTCTGGGGAGTATGCAT
CTGCGCCGCAGGAGGCGCAAACAGTTTCACATTCCACCAGCCAGGTTAAATCCGGTTCATTGGGGTCAAAAACAAGT
TTTCCGCCATATTTTTTGATGCGTTTCTTACCTTTGGTCTCCATGAGTTCGTGTCCTCGTTGAGTGACAAACAGGCT
GTCCGTGTCCCCGTAGACTGATTTTACAGGCCTCTTCTCCAGTGGAGTGCCTCGGTCTTCTTCGTACAGGAACTCTG
ACCACTCTGATACAAAGGCGCGCGTCCAGGCCAGCACAAAGGAGGCTATGTGGGAGGGGTAGCGATCGTTGTCAACC
AGGGGGTCCACCTTTTCCAAAGTATGCAAACACATGTCACCCTCTTCAACATCCAGGAATGTGATTGGCTTGTAGGT
GTATTTCACGTGACCTGGGGTCCCCGCTGGGGGGGTATAAAAGGGGGCGGTTCTTTGCTCTTCCTCACTGTCTTCCG
GATCGCTGTCCAGGAACGTCAGCTGTTGGGGTAGGTATTCCCTCTCGAAGGCGGGCATGACCTCTGCACTCAGGTTG
TCAGTTTCTAAGAACGAGGAGGATTTGATATTGACAGTGCCGGTTGAGATGCCTTTCATGAGGTTTTCGTCCATTTG
GTCAGAAAACACAATTTTTTTATTGTCAAGTTTGGTGGCAAATGATCCATACAGGGCGTTGGATAAAAGTTTGGCAA
TGGATCGCATGGTTTGGTTCTTTTCCTTGTCCGCGCGCTCTTTGGCGGCGATGTTGAGTTGGACATACTCGCGTGCC
AGGCACTTCCATTCGGGGAAGATAGTTGTTAATTCATCTGGCACGATTCTCACTTGCCACCCTCGATTATGCAAGGT
AATTAAATCCACACTGGTGGCCACCTCGCCTCGAAGGGGTTCATTGGTCCAACAGAGCCTACCTCCTTTCCTAGAAC
AGAAAGGGGGAAGTGGGTCTAGCATAAGTTCATCGGGAGGGTCTGCATCCATGGTAAAGATTCCCGGAAGTAAATCC
TTATCAAAATAGCTGATGGGAGTGGGGTCATCTAAGGCCATTTGCCATTCTCGAGCTGCCAGTGCGCGCTCATATGG
GTTAAGGGGACTGCCCCATGGCATGGGATGGGTGAGTGCAGAGGCATACATGCCACAGATGTCATAGACGTAGATGG
GATCCTCAAAGATGCCTATGTAGGTTGGATAGCATCGCCCCCCTCTGATACTTGCTCGCACATAGTCATATAGTTCA
TGTGATGGCGCTAGCAGCCCCGGACCCAAGTTGGTGCGATTGGGTTTTTCTGTTCTGTAGACGATCTGGCGAAAGAT
GGCGTGAGAATTGGAAGAGATGGTGGGTCTTTGAAAAATGTTGAAATGGGCATGAGGTAGACCTACAGAGTCTCTGA
CAAAGTGGGCATAAGATTCTTGAAGCTTGGTTACCAGTTCGGCGGTGACAAGTACGTCTAGGGCGCAGTAGTCAAGT
GTTTCTTGAATGATGTCATAACCTGGTTGGTTTTTCTTTTCCCACAGTTCGCGGTTGAGAAGGTATTCTTCGCGATC
CTTCCAGTACTCTTCTAGCGGAAACCCGTCTTTGTCTGCACGGTAAGATCCTAGCATGTAGAACTGATTAACTGCCT
TGTAAGGGCAGCAGCCCTTCTCTACGGGTAGAGAGTATGCTTGAGCAGCTTTTCGTAGCGAAGCGTGAGTAAGGGCA
AAGGTGTCTCTGACCATGACTTTGAGAAATTGGTATTTGAAGTCGATGTCGTCACAGGCTCCCTGTTCCCAGAGTTG
GAAGTCTACCCGTTTCTTGTAGGCGGGGTTGGGCAAAGCGAAAGTAACATCATTGAAGAGAATCTTACCGGCTCTGG
GCATAAAATTGCGAGTGATGCGAAAAGGCTGTGGTACTTCCGCTCGATTGTTGATCACCTGGGCAGCTAGGACGATC
TCGTCGAAACCGTTGATGTTGTGTCCTACGATGTATAATTCTATGAAACGCGGCGTGCCTCTGACGTGAGGTAGCTT
ACTGAGCTCATCAAAGGTTAGGTCTGTGGGGTCAGATAAGGCGTAGTGTTCGAGAGCCCATTCGTGCAGGTGAGGAT
TTGCATGTAGGAATGATGACCAAAGATCTACCGCCAGTGCTGTTTGTAACTGGTCCCGATACTGACGAAAATGCCGG
CCAATTGCCATTTTTTCTGGAGTGACACAGTAGAAGGTTCTGGGGTCTTGTTGCCATCGATCCCACTTGAGTTTAAT
GGCTAGATCGTGGGCCATGTTGACGAGACGCTCTTCTCCTGAGAGTTTCATGACCAGCATGAAAGGAACTAGTTGTT
TGCCAAAGGATCCCATCCAGGTGTAAGTTTCCACATCGTAGGTCAGGAAGAGTCTTTCTGTGCGAGGATGAGAGCCG
ATCGGGAAGAACTGGATTTCCTGCCACCAGTTGGAGGATTGGCTGTTGATGTGATGGAAGTAGAAGTTTCTGCGGCG
CGCCGAGCATTCGTGTTTGTGCTTGTACAGACGGCCGCAGTAGTCGCAGCGTTGCACGGGTTGTATCTCGTGAATGA
GTTGTACCTGGCTTCCCTTGACGAGAAATTTCAGTGGGAAGCCGAGGCCTGGCGATTGTATCTCGTGCTCTTCTATA
TTCGCTGTATCGGCCTGTTCATCTTCTGTTTCGATGGTGGTCATGCTGACGAGCCCCCGCGGGAGGCAAGTCCAGAC
CTCGGCGCGGGAGGGGCGGAGCTGAAGGACGAGAGCGCGCAGGCTGGAGCTGTCCAGAGTCCTGAGACGCTGCGGAC
TCAGGTTAGTAGGTAGGGACAGAAGATTAACTTGCATGATCTTTTCCAGGGCGTGCGGGAGGTTCAGATGGTACTTG
ATTTCCACAGGTTCGTTTGTAGAGACGTCAATGGCTTGCAGGGTTCCGTGTCCTTTGGGCGCCACTACCGTACCTTT
GTTTTTTCTTTTGATCGGTGGTGGCTCTCTTGCTTCTTGCATGCTCAGAAGCGGTGACGGGGACGCGCGCCGGGCGG
CAGCGGTTGTTCCGGACCCGAGGGCATGGCTGGTAGTGGCACGTCGGCGCCGCGCACGGGCAGGTTCTGGTACTGCG
CTCTGAGAAGACTTGCGTGCGCCACCACGCGTCGATTGACGTCTTGTATCTGACGTCTCTGGGTGAAAGCTACCGGC
CCCGTGAGCTTGAACCTGAAAGAGAGTTCAACAGAATCAATTTCGGTATCGTTAACGGCAGCTTGTCTCAGTATTTC
TTGTACGTCACCAGAGTTGTCCTGGTAGGCGATCTCCGCCATGAACTGCTCGATTTCTTCCTCCTGAAGATCTCCGC
GACCCGCTCTTTCGACGGTGGCCGCGAGGTCATTGGAGATACGGCCCATGAGTTGGGAGAATGCATTCATGCCCGCC
TCGTTCCAGACGCGGCTGTAAACCACGGCCCCCTCGGAGTCTCTTGCGCGCATCACCACCTGAGCGAGGTTAAGCTC
CACGTGTCTGGTGAAGACCGCATAGTTGCATAGGCGCTGAAAAAGGTAGTTGAGTGTGGTGGCAATGTGTTCGGCGA
CGAAGAAATACATGATCCATCGTCTCAGCGGCATTTCGCTAACATCGCCCAGAGCTTCCAAGCGCTCCATGGCCTCG
TAGAAGTCCACGGCAAAATTAAAAAACTGGGAGTTTCGCGCGGACACGGTCAATTCCTCCTCGAGAAGACGGATGAG
TTCGGCTATGGTGGCCCGTACTTCGCGTTCGAAGGCTCCCGGGATCTCTTCTTCCTCTTCTATCTCTTCTTCCACTA
ACATCTCTTCTTCGTCTTCAGGCGGGGGCGGAGGGGGCACGCGGCGACGTCGACGGCGCACGGGCAAACGGTCGATG
AATCGTTCAATGACCTCTCCGCGGCGGCGGCGCATGGTTTCAGTGACGGCGCGGCCGTTCTCGCGCGGTCGCAGAGT
AAAAACACCGCCGCGCATCTCCTTAAAGTGGTGACTGGGAGGTTCTCCGTTTGGGAGGGAGAGGGCGCTGATTATAC
ATTTTATTAATTGGCCCGTAGGGACTGCACGCAGAGATCTGATCGTGTCAAGATCCACGGGATCTGAAAACCTTTCG
ACGAAAGCGTCTAACCAGTCACAGTCACAAGGTAGGCTGAGTACGGCTTCTTGTGGGCGGGGGTGGTTATGTGTTCG
GTCTGGGTCTTCTGTTTCTTCTTCATCTCGGGAAGGTGAGACGATGCTGCTGGTGATGAAATTAAAGTAGGCAGTTC
TAAGACGGCGGATGGTGGCGAGGAGCACCAGGTCTTTGGGTCCGGCTTGCTGGATACGCAGGCGATTGGCCATTCCC
CAAGCATTATCCTGACATCTAGCAAGATCTTTGTAGTAGTCTTGCATGAGCCGTTCTACGGGCACTTCTTCCTCACC
CGTTCTGCCATGCATACGTGTGAGTCCAAATCCGCGCATTGGTTGTACCAGTGCCAAGTCAGCTACGACTCTTTCGG
CGAGGATGGCTTGCTGTACTTGGGTAAGGGTGGCTTGAAAGTCATCAAAATCCACAAAGCGGTGGTAAGCTCCTGTA
TTAATGGTGTAAGCACAGTTGGCCATGACTGACCAGTTAACTGTCTGGTGACCAGGGCGCACGAGCTCGGTGTATTT
AAGGCGCGAATAGGCGCGGGTGTCAAAGATGTAATCGTTGCAGGTGCGCACCAGATACTGGTACCCTATAAGAAAAT
GCGGCGGTGGTTGGCGGTAGAGAGGCCATCGTTCTGTAGCTGGAGCGCCAGGGGCGAGGTCTTCCAACATAAGGCGG
TGATAGCCGTAGATGTACCTGGACATCCAGGTGATTCCTGCGGCGGTAGTAGAAGCCCGAGGAAACTCGCGTACGCG
GTTCCAAATGTTGCGTAGCGGCATGAAGTAGTTCATTGTAGGCACGGTTTGACCAGTGAGGCGCGCGCAGTCATTGA
TGCTCTATAGACACGGAGAAAATGAAAGCGTTCAGCGACTCGACTCCGTAGCCTGGAGGAACGTGAACGGGTTGGGT
CGCGGTGTACCCCGGTTCGAGACTTGTACTCGAGCCGGCCGGAGCCGCGGCTAACGTGGTATTGGCACTCCCGTCTC
GACCCAGCCTACAAAAATCCAGGATACGGAATCGAGTCGTTTTGCTGGTTTCCGAATGGCAGGGAAGTGAGTCCTAT
TTTTTTTTTTTGCCGCTCAGATGCATCCCGTGCTGCGACAGATGCGCCCCCAACAACAGCCCCCCTCGCAGCAGCAG
CAGCAGCAATCACAAAAGGCTGTCCCTGCAACTACTGCAACTGCCGCCGTGAGCGGTGCGGGACAGCCCGCCTATGA
TCTGGACTTGGAAGAGGGCGAAGGACTGGCACGTCTAGGTGCGCCTTCACCCGAGCGGCATCCGCGAGTTCAACTGA
AAAAAGATTCTCGCGAGGCGTATGTGCCCCAACAGAACCTATTTAGAGACAGAAGCGGCGAGGAGCCGGAGGAGATG
CGAGCTTCCCGCTTTAACGCGGGTCGTGAGCTGCGTCACGGTTTGGACCGAAGACGAGTGTTGCGGGACGAGGATTT
CGAAGTTGATGAAATGACAGGGATCAGTCCTGCCAGGGCACACGTGGCTGCAGCCAACCTTGTATCGGCTTACGAGC
AGACAGTAAAGGAAGAGCGTAACTTCCAAAAGTCTTTTAATAATCATGTGCGAACCCTGATTGCCCGCGAAGAAGTT
ACCCTTGGTTTGATGCATTTGTGGGATTTGATGGAAGCTATCATTCAGAACCCTACTAGCAAACCTCTGACCGCCCA
GCTGTTTCTGGTGGTGCAACACAGCAGAGACAATGAGGCTTTCAGAGAGGCGCTGCTGAACATCACCGAACCCGAGG
GGAGATGGTTGTATGATCTTATCAACATTCTACAGAGTATCATAGTGCAGGAGCGGAGCCTGGGCCTGGCCGAGAAG
GTGGCTGCCATCAATTACTCGGTTTTGAGCTTGGGAAAATATTACGCTCGCAAAATCTACAAGACTCCATACGTTCC
CATAGACAAGGAGGTGAAGATAGATGGGTTCTACATGCGCATGACGCTCAAGGTCTTGACCCTGAGCGATGATCTTG
GGGTGTATCGCAATGACAGAATGCATCGCGCGGTTAGCGCCAGCAGGAGGCGCGAGTTAAGCGACAGGGAACTGATG
CACAGTTTGCAAAGAGCTCTGACTGGAGCTGGAACCGAGGGTGAGAATTACTTCGACATGGGAGCTGACTTGCAGTG
GCAGCCTAGTCGCAGGGCTCTGAGCGCCGCGACGGCAGGATGTGAGCTTCCTTACATAGAAGAGGCGGATGAAGGCG
AGGAGGAAGAGGGCGAGTACTTGGAAGACTGATGGCACAACCCGTGTTTTTTGCTAGATGGAACAGCAAGCACCGGA
TCCCGCAATGCGGGCGGCGCTGCAGAGCCAGCCGTCCGGCATTAACTCCTCGGACGATTGGACCCAGGCCATGCAAC
GTATCATGGCGTTGACGACTCGCAACCCCGAAGCCTTTAGACAGCAACCCCAGGCCAACCGTCTATCGGCCATCATG
GAAGCTGTAGTGCCTTCCCGCTCTAATCCCACTCATGAGAAGGTCCTGGCCATCGTGAACGCGTTGGTGGAGAACAA
AGCTATTCGTCCAGATGAGGCCGGACTGGTATACAACGCTCTCTTAGAACGCGTGGCTCGCTACAACAGTAGCAATG
TGCAAACCAATTTGGACCGTATGATAACAGATGTACGCGAAGCCGTGTCTCAGCGCGAAAGGTTCCAGCGTGATGCC
AACCTGGGTTCGCTGGTGGCGTTAAATGCTTTCTTGAGTACTCAGCCTGCTAATGTGCCGCGTGGTCAACAGGATTA
TACTAACTTTTTAAGCGCTTTGAGACTGATGGTATCAGAAGTACCTCAGAGCGAAGTGTATCAGTCCGGTCCTGATT
ACTTCTTTCAGACTAGCAGACAGGGCTTGCAGACGGTAAATCTGAGCCAAGCTTTTAAAAACCTTAAAGGTTTGTGG
GGAGTGCATGCCCCGGTAGGAGAAAGAGCAACCGTGTCTAGCTTGTTAACTCCGAACTCCCGCCTATTATTACTGTT
GGTAGCTCCTTTCACCGACAGCGGTAGCATCGACCGTAATTCCTATTTGGGTTACCTACTAAACCTGTATCGCGAAG
CCATAGGGCAAAGTCAGGTGGACGAGCAGACCTATCAAGAAATTACCCAAGTCAGTCGCGCTTTGGGACAGGAAGAC
ACTGGCAGTTTGGAAGCCACTCTGAACTTCTTGCTTACCAATCGGTCTCAAAAGATCCCTCCTCAATATGCTCTTAC
TGCGGAGGAGGAGAGGATCCTTAGATATGTGCAGCAGAGCGTGGGATTGTTTCTGATGCAAGAGGGGGCAACTCCGA
CTGCAGCACTGGACATGACAGCGCGAAATATGGAGCCCAGCATGTATGCCAGTAACCGACCTTTCATTAACAAACTG
CTGGACTACTTGCACAGAGCTGCCGCTATGAACTCTGATTATTTCACCAATGCCATCTTAAACCCGCACTGGCTGCC
CCCACCTGGTTTCTACACGGGCGAATATGACATGCCCGACCCTAATGACGGATTTCTGTGGGACGACGTGGACAGCG
ATGTTTTTTCACCTCTTTCTGATCATCGCACGTGGAAAAAGGAAGGCGGCGATAGAATGCATTCTTCTGCATCGCTG
TCCGGGGTCATGGGTGCTACCGCGGCTGAGCCCGAGTCTGCAAGTCCTTTTCCTAGTCTACCCTTTTCTCTACACAG
TGTACGTAGCAGCGAAGTGGGTAGAATAAGTCGCCCGAGTTTAATGGGCGAAGAGGAGTATCTAAACGATTCCTTGC
TCAGACCGGCAAGAGAAAAAAATTTCCCAAACAATGGAATAGAAAGTTTGGTGGATAAAATGAGTAGATGGAAGACT
TATGCTCAGGATCACAGAGACGAGCCTGGGATCATGGGGATTACAAGTAGAGCGAGCCGTAGACGCCAGCGCCATGA
CAGACAGAGGGGTCTTGTGTGGGACGATGAGGATTCGGCCGATGATAGCAGCGTGCTGGACTTGGGTGGGAGAGGAA
GGGGCAACCCGTTTGCTCATTTGCGCCCTCGCTTGGGTGGTATGTTGTAAAAAAAAATAAAAAAAAAACTCACCAAG
GCCATGGCGACGAGCGTACGTTCGTTCTTCTTTATTATCTGTGTCTAGTATAATGAGGCGAGTCGTGCTAGGCGGAG
CGGTGGTGTATCCGGAGGGTCCTCCTCCTTCGTACGAGAGCGTGATGCAGCAGCAGCAGGCGACGGCGGTGATGCAA
TCCCCACTGGAGGCTCCCTTTGTGCCTCCGCGATACCTGGCACCTACGGAGGGCAGAAACAGCATTCGTTATTCGGA
ACTGGCACCTCAGTACGATACCACCAGGTTGTATCTGGTGGACAACAAGTCGGCGGACATTGCTTCTCTGAACTATC
AGAATGACCACAGCAACTTCTTGACCACGGTGGTGCAAAACAATGACTTTACCCCTACGGAAGCCAGCACCCAGACC
ATTAACTTTGATGAACGATCGCGGTGGGGCGGTCAGCTAAAGACCATCATGCATACTAACATGCCAAACGTGAACGA
GTATATGTTTAGTAACAAGTTCAAAGCGCGTGTGATGGTGTCCAGAAAACCTCCCGACGGTGCTGCAGTTGGGGATA
CTTATGATCACAAGCAGGATATTTTGAAATATGAGTGGTTCGAGTTTACTTTGCCAGAAGGCAACTTTTCAGTTACT
ATGACTATTGATTTGATGAACAATGCCATCATAGATAATTACTTGAAAGTGGGTAGACAGAATGGAGTGCTTGAAAG
TGACATTGGTGTTAAGTTCGACACCAGGAACTTCAAGCTGGGATGGGATCCCGAAACCAAGTTGATCATGCCTGGAG
TGTATACGTATGAAGCCTTCCATCCTGACATTGTCTTACTGCCTGGCTGCGGAGTGGATTTTACCGAGAGTCGTTTG
AGCAACCTTCTTGGTATCAGAAAAAAACAGCCATTTCAAGAGGGTTTTAAGATTTTGTATGAAGATTTAGAAGGTGG
TAATATTCCGGCCCTCTTGGATGTAGATGCCTATGAGAACAGTAAGAAAGAACAAAAAGCCAAAATAGAAGCTGCTA
CAGCTGCTGCAGAAGCTAAGGCAAACATAGTTGCCAGCGACTCTACAAGGGTTGCTAACGCTGGAGAGGTCAGAGGA
GACAATTTTGCGCCAACACCTGTTCCGACTGCAGAATCATTATTGGCCGATGTGTCTGAAGGAACGGACGTGAAACT
CACTATTCAACCTGTAGAAAAAGATAGTAAGAATAGAAGCTATAATGTGTTGGAAGACAAAATCAACACAGCCTATC
GCAGTTGGTATCTTTCGTACAATTATGGCGATCCCGAAAAAGGAGTGCGTTCCTGGACATTGCTCACCACCTCAGAT
GTCACCTGCGGAGCAGAGCAGGTCTACTGGTCGCTTCCAGACATGATGAAGGATCCTGTCACTTTCCGCTCCACTAG
ACAAGTCAGTAACTACCCTGTGGTGGGTGCAGAGCTTATGCCCGTCTTCTCAAAGAGCTTCTACAACGAACAAGCTG
TGTACTCCCAGCAGCTCCGCCAGTCCACCTCGCTTACGCACGTCTTCAACCGCTTTCCTGAGAACCAGATTTTAATC
CGTCCGCCGGCGCCCACCATTACCACCGTCAGTGAAAACGTTCCTGCTCTCACAGATCACGGGACCCTGCCGTTGCG
CAGCAGTATCCGGGGAGTCCAACGTGTGACCGTTACTGACGCCAGACGCCGCACCTGTCCCTACGTGTACAAGGCAC
TGGGCATAGTCGCACCGCGCGTCCTTTCAAGCCGCACTTTCTAAAAAAAAAAAAAATGTCCATTCTTATCTCGCCCA
GTAATAACACCGGTTGGGGTCTGCGCGCTCCAAGCAAGATGTACGGAGGCGCACGCAAACGTTCTACCCAACATCCT
GTCCGTGTTCGCGGACATTTTCGCGCTCCATGGGGCGCCCTCAAGGGCCGCACTCGCGTTCGAACCACCGTCGATGA
TGTAATCGATCAGGTGGTTGCCGACGCCCGTAATTATACTCCTACTGCGCCTACATCTACTGTGGATGCAGTTATTG
ACAGTGTAGTGGCTGACGCTCGCAACTATGCTCGACGTAAGAGCCGGCGAAGGCGCATTGCCAGACGCCACCGAGCT
ACCACTGCCATGCGAGCCGCAAGAGCTCTGCTACGAAGAGCTAGACGCGTGGGGCGAAGAGCCATGCTTAGGGCGGC
CAGACGTGCAGCTTCGGGCGCCAGCGCCGGCAGGTCCCGCAGGCAAGCAGCCGCTGTCGCAGCGGCGACTATTGCCG
ACATGGCCCAATCGCGAAGAGGCAATGTATACTGGGTGCGTGACGCTGCCACCGGTCAACGTGTACCCGTGCGCACC
CGTCCCCCTCGCACTTAGAAGATACTGAGCAGTCTCCGATGTTGTGTCCCAGCGGCGAGGATGTCCAAGCGCAAATA
CAAGGAAGAAATGCTGCAGGTTATCGCACCTGAAGTCTACGGCCAACCGTTGAAGGATGAAAAAAAACCCCGCAAAA
TCAAGCGGGTTAAAAAGGACAAAAAAGAAGAGGAAGATGGCGATGATGGGCTGGCGGAGTTTGTGCGCGAGTTTGCC
CCACGGCGACGCGTGCAATGGCGTGGGCGCAAAGTTCGACATGTGTTGAGACCTGGAACTTCGGTGGTCTTTACACC
CGGCGAGCGTTCAAGCGCTACTTTTAAGCGTTCCTATGATGAGGTGTACGGGGATGATGATATTCTTGAGCAGGCGG
CTGACCGATTAGGCGAGTTTGCTTATGGCAAGCGTAGTAGAATAACTTCCAAGGATGAGACAGTGTCGATACCCTTG
GATCATGGAAATCCCACCCCTAGTCTTAAACCGGTCACTTTGCAGCAAGTGTTACCCGTAACTCCGCGAACAGGTGT
TAAACGCGAAGGTGAAGATTTGTATCCCACTATGCAACTGATGGTACCCAAACGCCAGAAGTTGGAGGACGTTTTGG
AGAAAGTAAAAGTGGATCCAGATATTCAACCTGAGGTTAAAGTGAGACCCATTAAGCAGGTAGCGCCTGGTCTGGGG
GTACAAACTGTAGACATTAAGATTCCCACTGAAAGTATGGAAGTGCAAACTGAACCCGCAAAGCCTACTGCCACCTC
CACTGAAGTGCAAACGGATCCATGGATGCCCATGCCTATTACAACTGACGCCGCCGGTCCCACTCGAAGATCCCGAC
GAAAGTACGGTCCAGCAAGTCTGTTGATGCCCAATTATGTTGTACACCCATCTATTATTCCTACTCCTGGTTACCGA
GGCACTCGCTACTATCGCAGCCGAAACAGTACCTCCCGCCGTCGCCGCAAGACACCTGCAAATCGCAGTCGTCGCCG
TAGACGCACAAGCAAACCGACTCCCGGCGCCCTGGTGCGGCAAGTGTACCGCAATGGTAGTGCGGAACCTTTGACAC
TGCCGCGTGCGCGTTACCATCCGAGTATCATCACTTAATCAATGTTGCCGCTGCCTCCTTGCAGATATGGCCCTCAC
TTGTCGCCTTCGCGTTCCCATCACTGGTTACCGAGGAAGAAACTCGCGCCGTAGAAGAGGGATGTTGGGACGCGGAA
TGCGACGCTACAGGCGACGGCGTGCTATCCGCAAGCAATTGCGGGGTGGTTTTTTACCAGCCTTAATTCCAATTATC
GCTGCTGCAATTGGCGCGATACCAGGCATAGCTTCCGTGGCGGTTCAGGCCTCGCAACGACATTGACATTGGAAAAA
AACGTATAAATAAAAAAAAAAAAATACAATGGACTCTGACACTCCTGGTCCTGTGACTATGTTTTCTTAGAGATGGA
AGACATCAATTTTTCATCCTTGGCTCCGCGACACGGCACGAAGCCGTACATGGGCACCTGGAGCGACATCGGCACGA
GCCAACTGAACGGGGGCGCCTTCAATTGGAGCAGTATCTGGAGCGGGCTTAAAAATTTTGGCTCAACCATAAAAACA
TACGGGAACAAAGCTTGGAACAGCAGTACAGGACAGGCGCTTAGAAATAAACTTAAAGACCAGAACTTCCAACAAAA
AGTAGTCGATGGGATAGCTTCCGGCATCAATGGAGTGGTAGATTTGGCTAACCAGGCTGTGCAGAAAAAGATAAACA
GTCGTTTGGACCCGCCGCCAGCAACCCCAGGTGAAATGCAAGTGGAGGAAGAAATTCCTCCGCCAGAAAAACGAGGC
GACAAGCGTCCGCGTCCCGATTTGGAAGAGACGCTGGTGACGCGCGTAGATGAACCGCCTTCTTATGAGGAAGCAAC
GAAGCTTGGAATGCCCACCACTAGACCGATAGCCCCAATGGCCACCGGGGTGATGAAACCTTCTCAGTTGCATCGAC
CCGTCACCTTGGATTTGCCCCCTCCCCCTGCTGCTACTGCTGTACCCGCTTCTAAGCCTGTCGCTGCCCCGAAACCA
GTCGCCGTAGCCAGGTCACGTCCCGGGGGCGCTCCTCGTCCAAATGCGCACTGGCAAAATACTCTGAACAGCATCGT
GGGTCTAGGCGTGCAAAGTGTAAAACGCCGTCGCTGCTTTTAATTAAATATGGAGTAGCGCTTAACTTGCCTATCTG
TGTATATGTGTCATTACACGCCGTCACAGCAGCAGAGGAAAAAAGGAAGAGGTCGTGCGTCGACGCTGAGTTACTTT
CAAGATGGCCACCCCATCGATGCTGCCCCAATGGGCATACATGCACATCGCCGGACAGGATGCTTCGGAGTACCTGA
GTCCGGGTCTGGTGCAGTTCGCCCGCGCCACAGACACCTACTTCAATCTGGGAAATAAGTTTAGAAATCCCACCGTA
GCGCCGACCCACGATGTGACCACCGACCGTAGCCAGCGGCTCATGTTGCGCTTCGTGCCCGTTGACCGGGAGGACAA
TACATACTCTTACAAAGTGCGGTACACCCTGGCCGTGGGCGACAACAGAGTGCTGGATATGGCCAGCACGTTCTTTG
ACATTAGGGGTGTGTTGGACAGAGGTCCCAGTTTCAAACCCTATTCTGGTACGGCTTACAACTCCCTGGCTCCTAAA
GGCGCTCCAAATACATCTCAGTGGATTGCAGAAGGTGTAAAAAATACAACTGGTGAGGAACACGTAACAGAAGAGGA
AACCAATACTACTACTTACACTTTTGGCAATGCTCCTGTAAAAGCTGAAGCTGAAATTACAAAAGAAGGACTCCCAG
TAGGTTTGGAAGTTTCAGATGAAGAAAGTAAACCGATTTATGCTGATAAAACATATCAGCCAGAACCTCAGCTGGGA
GATGAAACTTGGACTGACCTTGATGGAAAAACCGAAAAGTATGGAGGCAGGGCTCTCAAACCCGATACTAAGATGAA
ACCATGCTACGGGTCCTTTGCCAAACCTACTAATGTGAAAGGCGGTCAGGCAAAACAAAAAACAACGGAGCAGCCAA
ATCAGAAAGTCGAATATGATATCGACATGGAGTTTTTTGATGCGGCATCGCAGAAAACAAACTTAAGTCCTAAAATT
GTCATGTATGCAGAAAATGTAAATTTGGAAACTCCAGACACTCATGTAGTGTACAAACCTGGAACAGAAGACACAAG
TTCCGAAGCTAATTTGGGACAACAATCTATGCCCAACAGACCCAACTACATTGGCTTCAGAGATAACTTTATTGGAC
TTATGTACTATAACAGTACTGGTAACATGGGGGTGCTGGCTGGTCAAGCGTCTCAGTTAAATGCAGTGGTTGACTTG
CAGGACAGAAACACAGAACTTTCTTACCAACTCTTGCTTGACTCTCTGGGCGACAGAACCAGATACTTTAGCATGTG
GAATCAGGCTGTGGACAGTTATGATCCTGATGTACGTGTTATTGAAAATCATGGTGTGGAAGATGAACTTCCCAACT
ACTGTTTTCCACTGGACGGCATAGGTGTTCCAACAACCAGTTACAAATCAATAGTTCCAAATGGAGACAATGCGCCT
AATTGGAAGGAACCTGAAGTAAATGGAACAAGTGAGATCGGACAGGGTAATTTGTTTGCCATGGAAATTAACCTTCA
AGCCAATCTATGGCGAAGTTTCCTTTATTCCAATGTGGCTCTATATCTCCCAGACTCGTACAAATACACCCCGTCCA
ATGTCACTCTTCCAGAAAACAAAAACACCTACGACTACATGAACGGGCGGGTGGTGCCGCCATCTCTAGTAGACACC
TATGTGAACATTGGTGCCAGGTGGTCTCTGGATGCCATGGACAATGTCAACCCATTCAACCACCACCGTAACGCTGG
CTTGCGTTACCGATCCATGCTTCTGGGTAACGGACGTTATGTGCCTTTCCACATACAAGTGCCTCAAAAATTCTTCG
CTGTTAAAAACCTGCTGCTTCTCCCAGGCTCCTACACTTATGAGTGGAACTTTAGGAAGGATGTGAACATGGTTCTA
CAGAGTTCCCTCGGTAACGACCTGCGGGTAGATGGCGCCAGCATCAGTTTCACGAGCATCAACCTCTATGCTACTTT
TTTCCCCATGGCTCACAACACCGCTTCCACCCTTGAAGCCATGCTGCGGAATGACACCAATGATCAGTCATTCAACG
ACTACCTATCTGCAGCTAACATGCTCTACCCCATTCCTGCCAATGCAACCAATATTCCCATTTCCATTCCTTCTCGC
AACTGGGCGGCTTTCAGAGGCTGGTCATTTACCAGACTGAAAACCAAAGAAACTCCCTCTTTGGGGTCTGGATTTGA
CCCCTACTTTGTCTATTCTGGTTCTATTCCCTACCTGGATGGTACCTTCTACCTGAACCACACTTTTAAGAAGGTTT
CCATCATGTTTGACTCTTCAGTGAGCTGGCCTGGAAATGACAGGTTACTATCTCCTAACGAATTTGAAATAAAGCGC
ACTGTGGATGGCGAAGGCTACAACGTAGCCCAATGCAACATGACCAAAGACTGGTTCTTGGTACAGATGCTCGCCAA
CTACAACATCGGCTATCAGGGCTTCTACATTCCAGAAGGATACAAAGATCGCATGTATTCATTTTTCAGAAACTTCC
AGCCCATGAGCAGGCAGGTGGTTGATGAGGTCAATTACAAAGACTTCAAGGCCGTCGCCATACCCTACCAACACAAC
AACTCTGGCTTTGTGGGTTACATGGCTCCGACCATGCGCCAAGGTCAACCCTATCCCGCTAACTATCCCTATCCACT
CATTGGAACAACTGCCGTAAATAGTGTTACGCAGAAAAAGTTCTTGTGTGACAGAACCATGTGGCGCATACCGTTCT
CGAGCAACTTCATGTCTATGGGGGCCCTTACAGACTTGGGACAGAATATGCTCTATGCCAACTCAGCTCATGCTCTG
GACATGACCTTTGAGGTGGATCCCATGGATGAGCCCACCCTGCTTTATCTTCTCTTCGAAGTTTTCGACGTGGTCAG
AGTGCATCAGCCACACCGCGGCATCATCGAGGCAGTCTACCTGCGTACACCGTTCTCGGCCGGTAACGCTACCACGT
AAGAAGCTTCTTGCTTCTTGCAAATAGCAGCTGCAACCATGGCCTGCGGATCCCAAAACGGCTCCAGCGAGCAAGAG
CTCAGAGCCATTGTCCAAGACCTGGGTTGCGGACCCTATTTTTTGGGAACCTACGATAAGCGCTTCCCGGGGTTCAT
GGCCCCCGATAAGCTCGCCTGTGCCATTGTAAATACGGCCGGACGTGAGACGGGGGGAGAGCACTGGTTGGCTTTCG
GTTGGAACCCACGTTCTAACACCTGCTACCTTTTTGATCCTTTTGGATTCTCGGATGATCGTCTCAAACAGATTTAC
CAGTTTGAATATGAGGGTCTCCTGCGCCGCAGCGCTCTTGCTACCAAGGACCGCTGTATTACGCTGGAAAAATCTAC
CCAGACCGTGCAGGGTCCCCGTTCTGCCGCCTGCGGACTTTTCTGCTGCATGTTCCTTCACGCCTTTGTGCACTGGC
CTGACCGTCCCATGGACGGAAACCCCACCATGAAATTGCTAACTGGAGTGCCAAACAACATGCTTCATTCTCCTAAA
GTCCAGCCCACCCTGTGTGACAATCAAAAAGCACTCTACCATTTTCTTAATACCCATTCGCCTTATTTTCGCTCCCA
TCGTACACACATCGAAAGGGCCACTGCGTTCGACCGTATGGATGTTCAATAATGACTCATGTAAACAACGTGTTCAA
TAAACATCACTTTATTTTTTTACATGTATCAAGGCTCTGCATTACTTATTTATTTACAAGTCGAATGGGTTCTGACG
AGAATCAGAATGACCCGCAGGCAGTGATACGTTGCGGAACTGATACTTGGGTTGCCACTTGAATTCGGGAATCACCA
ACTTGGGAACCGGTATATCGGGCAGGATGTCACTCCACAGCTTTCTGGTCAGCTGCAAAGCTCCAAGCAGGTCAGGA
GCCGAAATCTTGAAATCACAATTAGGACCAGTGCTTTGAGCGCGAGAGTTGCGGTACACCGGATTGCAGCACTGAAA
CACCATCAGCGACGGATGTCTCACGCTTGCCAGCACGGTGGGATCTGCAATCATGCCCACATCCAGATCTTCAGCAT
TGGCAATGCTGAACGGGGTCATCTTGCAGGTCTGCCTACCCATGGCGGGCACCCAATTAGGCTTGTGGTTGCAATCG
CAGTGCAGGGGGATCAGTATCATCTTGGCCTGATCCTGTCTGATTCCTGGATACACGGCTCTCATGAAAGCATCATA
TTGCTTGAAAGCCTGCTGGGCTTTACTACCCTCGGTATAAAACATCCCGCAGGACCTGCTCGAAAACTGGTTAGCTG
CACAGCCGGCATCATTCACACAGCAGCGGGCGTCATTGTTAGCTATTTGCACCACACTTCTGCCCCAGCGGTTTTGG
GTGATTTTGGTTCGCTCGGGATTCTCCTTTAAGGCTCGTTGTCCGTTCTCGCTGGCCACATCCATCTCGATAATCTG
CTCCTTCTGAATCATAATATTGCCATGCAGGCACTTCAGCTTGCCCTCATAATCATTGCAGCCATGAGGCCACAACG
CACAGCCTGTACATTCCCAATTATGGTGGGCGATCTGAGAAAAAGAATGTATCATTCCCTGCAGAAATCTTCCCATC
ATCGTGCTCAGTGTCTTGTGACTAGTGAAAGTTAACTGGATGCCTCGGTGCTCCTCGTTTACGTACTGGTGACAGAT
GCGCTTGTATTGTTCGTGTTGCTCAGGCATTAGTTTAAAAGAGGTTCTAAGTTCGTTATCCAGCCTGTACTTCTCCA
TCAGCAGACACATCACTTCCATGCCTTTCTCCCAAGCAGACACCAGGGGCAAGCTAATCGGATTCTTAACAGTGCAG
GCAGCAGCTCCTTTAGCCAGAGGGTCATCTTTAGCGATCTTCTCAATGCTTCTTTTGCCATCCTTCTCAACGATGCG
CACGGGCGGGTAGCTGAAACCCACTGCTACAAGTTGCGCCTCTTCTCTTTCTTCTTCGCTGTCTTGACTGATGTCTT
GCATGGGGATATGTTTGGTCTTCCTTGGCTTCTTTTTGGGGGGTATCGGAGGAGGAGGACTGTCGCTCCGTTCCGGA
GACAGGGAGGATTGTGACGTTTCGCTCACCATTACCAACTGACTGTCGGTAGAAGAACCTGACCCCACACGGCGACA
GGTGTTTCTCTTCGGGGGCAGAGGTGGAGGCGATTGCGAAGGGCTGCGGTCCGACCTGGAAGGCGGATGACTGGCAG
AACCCCTTCCGCGTTCGGGGGTGTGCTCCCTGTGGCGGTCGCTTAACTGATTTCCTTCGCGGCTGGCCATTGTGTTC
TCCTAGGCAGAGAAACAACAGACATGGAAACTCAGCCATTGCTGTCAACATCGCCACGAGTGCCATCACATCTCGTC
CTCAGCGACGAGGAAAAGGAGCAGAGCTTAAGCATTCCACCGCCCAGTCCTGCCACCACCTCTACCCTAGAAGATAA
GGAGGTCGACGCATCTCATGACATGCAGAATAAAAAAGCGAAAGAGTCTGAGACAGACATCGAGCAAGACCCGGGCT
ATGTGACACCGGTGGAACACGAGGAAGAGTTGAAACGCTTTCTAGAGAGAGAGGATGAAAACTGCCCAAAACAACGA
GCAGATAACTATCACCAAGATGCTGGAAATAGGGATCAGAACACCGACTACCTCATAGGGCTTGACGGGGAAGACGC
GCTCCTTAAACATCTAGCAAGACAGTCGCTCATAGTCAAGGATGCATTATTGGACAGAACTGAAGTGCCCATCAGTG
TGGAAGAGCTCAGCCGCGCCTACGAGCTTAACCTCTTTTCACCTCGTACTCCCCCCAAACGTCAGCCAAACGGCACC
TGCGAGCCAAATCCTCGCTTAAACTTTTATCCAGCTTTTGCTGTGCCAGAAGTACTGGCTACCTATCACATCTTTTT
TAAAAATCAAAAAATTCCAGTCTCCTGCCGCGCTAATCGCACCCGCGCCGATGCCCTACTCAATCTGGGACCTGGTT
CACGCTTACCTGATATAGCTTCCTTGGAAGAGGTTCCAAAGATCTTCGAGGGTCTGGGCAATAATGAGACTCGGGCC
GCAAATGCTCTGCAAAAGGGAGAAAATGGCATGGATGAGCATCACAGCGTTCTGGTGGAATTGGAAGGCGATAATGC
CAGACTCGCAGTACTCAAGCGAAGCATCGAGGTCACACACTTCGCATATCCCGCTGTCAACCTGCCCCCTAAAGTCA
TGACGGCGGTCATGGACCAGTTACTCATTAAGCGCGCAAGTCCCCTTTCAGAAGACATGCATGACCCAGATGCCTGT
GATGAGGGTAAACCAGTGGTCAGTGATGAGCAGCTAACCCGATGGCTGGGCACCGACTCTCCCAGGGATTTGGAAGA
GCGTCGCAAGCTTATGATGGCCGTGGTGCTGGTTACCGTAGAACTAGAGTGTCTCCGACGTTTCTTTACCGATTCAG
AAACCTTGCGCAAACTCGAAGAGAATCTGCACTACACTTTTAGACACGGCTTTGTGCGGCAGGCATGCAAGATATCT
AACGTGGAACTCACCAACCTGGTTTCCTACATGGGTATTCTGCATGAGAATCGCCTAGGACAAAGCGTGCTGCACAG
CACCCTGAAGGGGGAAGCCCGCCGTGATTACATCCGCGATTGTGTCTATCTGTACCTGTGCCACACGTGGCAAACCG
GCATGGGTGTATGGCAGCAATGTTTAGAAGAACAGAACTTGAAAGAGCTTGACAAGCTCTTACAGAAATCTCTTAAG
GTTCTGTGGACAGGGTTCGACGAGCGCACCGTCGCTTCCGACCTGGCAGACCTCATCTTCCCAGAGCGTCTCAGGGT
TACTTTGCGAAACGGATTGCCTGACTTTATGAGCCAGAGCATGCTTAACAATTTTCGCTCTTTCATCCTGGAACGCT
CCGGTATCCTGCCCGCCACCTGCTGCGCACTGCCCTCCGACTTTGTGCCTCTCACCTACCGCGAGTGCCCCCCGCCG
CTATGGAGTCACTGCTACCTGTTCCGTCTGGCCAACTATCTCTCCTACCACTCGGATGTGATCGAGGATGTGAGCGG
AGACGGCTTGCTGGAGTGTCACTGCCGCTGCAATCTGTGCACGCCCCACCGGTCCCTAGCTTGCAACCCCCAGTTGA
TGAGCGAAACCCAGATAATAGGCACCTTTGAATTGCAAGGCCCCAGCAGCCAAGGCGATGGGTCTTCTCCTGGGCAA
AGTTTAAAACTGACCCCGGGACTGTGGACCTCCGCCTACTTGCGCAAGTTTGCTCCGGAAGATTACCACCCCTATGA
AATCAAGTTCTATGAGGACCAATCACAGCCTCCAAAGGCCGAACTTTCGGCCTGCGTCATCACCCAGGGGGCAATTC
TGGCCCAATTGCAAGCCATCCAAAAATCCCGCCAAGAATTTCTACTGAAAAAGGGTAAGGGGGTCTACCTTGACCCC
CAGACCGGCGAGGAACTCAACACAAGGTTCCCTCAGGATGTCCCAACGACGAGAAAACAAGAAGTTGAAGGTGCAGC
CGCCGCCCCCAGAAGATATGGAGGAAGATTGGGACAGTCAGGCAGAGGAGGCGGAGGAGGACAGTCTGGAGGACAGT
CTGGAGGAAGACAGTTTGGAGGAGGAAAACGAGGAGGCAGAGGAGGTGGAAGAAGTAACCGCCGACAAACAGTTATC
CTCGGCTGCGGAGACAAGCAACAGCGCTACCATCTCCGCTCCGAGTCGAGGAACCCGGCGGCGTCCCAGCAGTAGAT
GGGACGAGACCGGACGCTTCCCGAACCCAACCAGCGCTTCCAAGACCGGTAAGAAGGATCGGCAGGGATACAAGTCC
TGGCGGGGGCATAAGAATGCCATCATCTCCTGCTTGCATGAGTGCGGGGGCAACATATCCTTCACGCGGCGCTACTT
GCTATTCCACCATGGGGTGAACTTTCCGCGCAATGTTTTGCATTACTACCGTCACCTCCACAGCCCCTACTATAGCC
AGCAAATCCCGGCAGTCTCGACAGATAAAGACAGCGGCGGCGACCTCCAACAGAAAACCAGCAGCGGCAGTTAGAAA
ATACACAACAAGTGCAGCAACAGGAGGATTAAAGATTACAGCCAACGAGCCAGCGCAAACCCGAGAGTTAAGAAATC
GGATCTTTCCAACCCTGTATGCCATCTTCCAGCAGAGTCGGGGTCAAGAGCAGGAACTGAAAATAAAAAACCGATCT
CTGCGTTCGCTCACCAGAAGTTGTTTGTATCACAAGAGCGAAGATCAACTTCAGCGCACTCTCGAGGACGCCGAGGC
TCTCTTCAACAAGTACTGCGCGCTGACTCTTAAAGAGTAGGCAGCGACCGCGCTTATTCAAAAAAGGCGGGAATTAC
ATCATCCTCGACATGAGTAAAGAAATTCCCACGCCTTACATGTGGAGTTATCAACCCCAAATGGGATTGGCGGCAGG
CGCCTCCCAGGACTACTCCACCCGCATGAATTGGCTCAGCGCCGGGCCTTCTATGATTTCTCGAGTTAATGATATAC
GCGCCTACCGAAACCAAATACTTTTGGAACAGTCAGCTCTTACCACCACGCCCCGCCAACACCTTAATCCCAGAAAT
TGGCCCGCCGCCCTAGTGTACCAGGAAAGTCCCGCTCCCACCACTGTATTACTTCCTCGAGACGCCCAGGCCGAAGT
CCAAATGACTAATGCAGGTGCGCAGTTAGCTGGCGGCTCCACCCTATGTCGTCACAGGCCTCGGCATAATATAAAAC
GCCTGATGATCAGAGGCCGAGGTATCCAGCTCAACGACGAGTCGGTGAGCTCTCCGCTTGGTCTACGACCAGACGGA
ATCTTTCAGATTGCCGGCTGCGGGAGATCTTCCTTCACCCCTCGTCAGGCTGTTCTGACTTTGGAAAGTTCGTCTTC
GCAACCCCGCTCGGGCGGAATCGGGACCGTTCAATTTGTGGAGGAGTTTACTCCCTCTGTCTACTTCAACCCCTTCT
CCGGATCTCCTGGGCATTACCCGGACGAGTTCATACCGAACTTCGACGCGATTAGCGAGTCAGTGGACGGCTACGAT
TGATGTCTGGTGACGCGGCTGAGCTATCTCGGCTGCGACATCTAGACCACTGCCGCCGCTTTCGCTGCTTTGCCCGG
GAACTCATTGAGTTCATCTACTTCGAACTCCCCAAGGATCACCCTCAAGGTCCGGCCCACGGAGTGCGGATTTCTAT
CGAAGGCAAAATAGACTCTCGCCTGCAACGAATTTTCTCCCAGCGGCCCGTGCTGATCGAGCGAGACCAGGGAAACA
CCACGGTTTCCATCTACTGCATTTGTAATCACCCCGGATTGCATGAAAGCCTTTGCTGTCTTATGTGTACTGAGTTT
AATAAAAACTGAATTAAGACTCTCCTACGGACTGCCGCTTCTTCAACCCGGATTTTACAACCAGAAGAACGAAACTT
TTCCTGTCGTCCAGGACTCTGTTAACTTCACCTTTCCTACTCACAAACTAGAAGCTCAACGACTACACCGCTTTTCC
AGAAGCATTTTCCCTACTAATACTACTTTCAAAACCGGAGGTGAGCTCCAAGGTCTTCCTACAGAAAACCCTTGGGT
GGAAGCGGGCCTTGTAGTGCTAGGAATTCTTGCGGGTGGGCTTGTGATTATTCTTTGCTACCTATACACACCTTGCT
TCACTTTCTTAGTGGTGTTGTGGTATTGGTTTAAAAAATGGGGCCCATACTAGTCTTGCTTGTTTTACTTTCGCTTT
TGGAACCGGGTTCTGCCAATTACGATCCATGTCTAGACTTCGACCCAGAAAACTGCACACTTACTTTTGCACCCGAC
ACAAGCCGCATCTGTGGAGTTCTTATTAAGTGCGGATGGGAATGCAGGTCCGTTGAAATTACACACAATAACAAAAC
CTGGAACAATACCTTATCCACCACATGGGAGCCAGGAGTTCCCGAGTGGTACACTGTCTCTGTCCGAGGTCCTGACG
GTTCCATCCGCATTAGTAACAACACTTTCATTTTTTCTGAAATGTGCGATCTGGCCATGTTCATGAGCAAACAGTAT
TCTCTATGGCCTCCTAGCAAGGACAACATCGTAACGTTCTCCATTGCTTATTGCTTGTGCGCTTGCCTTCTTACTGC
TTTACTGTGCGTATGCATACACCTGCTTGTAACCACTCGCATCAAAAACGCCAATAACAAAGAAAAAATGCCTTAAC
CTCTTTCTGTTTACAGACATGGCTTCTCTTACATCTCTCATATTTGTCAGCATTGTCACTGCCGCTCATGGACAAAC
AGTCGTCTCTATCCCTCTAGGACATAATTACACTCTCATAGGACCCCCAATCACTTCAGAGGTCATCTGGACCAAAC
TGGGAAGCGTTGATTACTTTGATATAATCTGCAACAAAACAAAACCAATAATAGTAACTTGCAACATACAAAATCTT
ACATTGATTAATGTTAGCAAAGTTTACAGCGGTTACTATTATGGTTATGACAGATACAGTAGTCAATATAGAAATTA
CTTGGTTCGTGTTACCCAGTTGAAAACCACGAAAATGCCAAATATGGCAAAGATTCGATCCGATGACAATTCTCTAG
AAACTTTTACATCTCCCACCACACCCGACGAAAAAAACATCCCAGATTCAATGATTGCAATTGTTGCAGCGGTGGCA
GTGGTGATGGCACTAATAATAATATGCATGCTTTTATATGCTTGTCGCTACAAAAAGTTTCATCCTAAAAAACAAGA
TCTCCTACTAAGGCTTAACATTTAATTTCTTTTTATACAGCCATGGTTTCCACTACCACATTCCTTATGCTTACTAG
TCTCGCAACTCTGACTTCTGCTCGCTCACACCTCACTGTAACTATAGGCTCAAACTGCACACTAAAAGGACCTCAAG
GTGGTCATGTCTTTTGGTGGAGAATATATGACAATGGATGGTTTACAAAACCATGTGACCAACCTGGTAGATTTTTC
TGCAACGGCAGAGACCTAACCATTATCAACGTGACAGCAAATGACAAAGGCTTCTATTATGGAACCGACTATAAAAG
TAGTTTAGATTATAACATTATTGTACTGCCATCTACCACTCCAGCACCCCGCACAACTACTTTCTCTAGCAGCAGTG
TCGCTAACAATACAATTTCCAATCCAACCTTTGCCGCGCTTTTAAAACGCACTGTGAATAATTCTACAACTTCACAT
ACAACAATTTCCACTTCAACAATCAGCATTATCGCTGCAGTGACAATTGGAATATCTATTCTTGTTTTTACCATAAC
CTACTACGCCTGCTGCTATAGAAAAGACAAACATAAAGGTGATCCATTACTTAGATTTGATATTTAATTTGTTCTTT
TTTTTTTTATTTACAGTATGGTGAACACCAATCATGGTACCTAGAAATTTCTTCTTCACCATACTCATTTGTGCATT
TAATGTTTGCGCTACTTTCACAGCAGTAGCCACAGCAACCCCAGACTGTATAGGAGCATTTGCTTCCTATGCACTTT
TTGCTTTTGTTACTTGCATCTGCGTATGTAGCATAGTCTGCCTGGTTATTAATTTTTTCCAACTTATAGACTGGATC
CTTGTGCGAATTGCCTACCTGCGCCACCATCCCGAATACCGCAACCAAAATATCGCGGCACTTCTTAGACTCATCTA
AAACCATGCAGGCTATACTACCAATATTTTTGCTTCTATTGCTTCCCTACGCTGTCTCAACCCCAGCTGCCTATAGT
ACTCCACCAGAACACCTTAGAAAATGCAAATTCCAACAACCGTGGTCATTTCTTGCTTGCTATCGAGAAAAATCAGA
AATTCCCCCAAATTTAATAATGATTGCTGGAATAATTAATATAATCTGTTGCACCATAATTTCATTTTTGATATACC
CCCTATTTGATTTTGGCTGGAATGCTCCCAATGCACATGATCATCCACAAGACCCAGAGGAACACATTCCCCTACAA
AACATGCAACATCCAATAGCGCTAATAGATTACGAAAGTGAACCACAACCCCCACTACTCCCTGCTATTAGTTACTT
CAACCTAACCGGCGGAGATGACTGAAACACTCACCACCTCCAATTCCGCCGAGGATCTGCTCGATATGGACGGCCGC
GTCTCAGAACAGCGACTCGCCCAACTACGCATCCGCCAGCAGCAGGAACGCGCGGCCAAAGAGCTCAGAGATGTCAT
CCAAATTCACCAATGCAAAAAAGGCATATTCTGTTTGGTAAAACAAGCCAAGATATCCTACGAGATCACCGCTACTG
ACCATCGCCTCTCTTACGAACTTGGCCCCCAACGACAAAAATTTACCTGCATGGTGGGAATCAACCCCATAGTTATC
ACCCAGCAAAGTGGAGATACTAAGGGTTGCATTCACTGCTCCTGCGATTCCATCGAGTGCACCTACACCCTGCTGAA
GACCCTATACGGCCTAAGAGACCTGCTACCAATGAATTAAAAAATGATTAATAAAAAATCACTTACTTGAAATCAGC
AATAAGGTCTCTGTTGAAATTTTCTCCCAGCAGCACCTCACTTCCCTCTTCCCAACTCTGGTATTCTAAACCCCGTT
CAGCGGCATACTTTCTCCATACTTTAAAGGGGATGTCAAATTTTAGCTCCTCTCCTGTACCCACAATCTTCATGTCT
TTCTTCCCAGATGACCAAGAGAGTCCGGCTCAGTGACTCCTTCAACCCTGTCTACCCCTATGAAGATGAAAGCACCT
CCCAACACCCCTTTATAAACCCAGGGTTTATTTCCCCAAATGGCTTCACACAAAGCCCAAACGGAGTTCTTACTTTA
AAATGTTTAACCCCACTAACAACCACAGGCGGATCTCTACAGCTAAAAGTGGGAGGGGGACTTACAGTGGATGACAC
CAACGGTTTTTTGAAAGAAAACATAAGTGCCACCACACCACTCGTTAAGACTGGTCACTCTATAGGTTTACCACTAG
GAGCCGGATTGGGAACGAATGAAAATAAACTTTGTATCAAATTAGGACAAGGACTTACATTCAATTCAAACAACATT
TGCATTGATGACAATATTAACACCTTATGGACAGGAGTCAACCCCACCGAAGCCAACTGTCAAATCATGAACTCCAG
TGAATCTAATGATTGCAAATTAATTCTAACACTAGTTAAAACTGGAGCACTAGTCACTGCATTTGTTTATGTTATAG
GAGTATCTAACAATTTTAATATGCTAACTACACACAGAAATATAAATTTTACTGCAGAGCTGTTTTTCGATTCTACT
GGTAATTTACTAACTAGACTCTCATCCCTCAAAACTCCACTTAATCATAAATCAGGACAAAACATGGCTACTGGTGC
CATTACTAATGCTAAAGGTTTCATGCCCAGCACGACTGCCTATCCTTTCAATGATAATTCTAGAGAAAAAGAAAACT
ACATTTACGGAACTTGTTACTACACAGCTAGTGATCGCACTGCTTTTCCCATTGACATATCTGTCATGCTTAACCGA
AGAGCAATAAATGACGAGACATCATATTGTATTCGTATAACTTGGTCCTGGAACACAGGAGATGCCCCAGAGGTGCA
AACCTCTGCTACAACCCTAGTCACCTCCCCATTTACCTTTTACTACATCAGAGAAGACGACTGACAAATAAAGTTTA
ACTTGTTTATTTGAAAATCAATTCACAAAATCCGAGTAGTTATTTTGCCTCCCCCTTCCCATTTAACAGAATACACC
AATCTCTCCCCACGCACAGCTTTAAACATTTGGATACCATTAGATATAGACATGGTTTTAGATTCCACATTCCAAAC
AGTTTCAGAGCGAGCCAATCTGGGGTCAGTGATAGATAAAAATCCATCGGGATAGTCTTTTAAAGCGCTTTCACAGT
CCAACTGCTGCGGATGCGACTCCGGAGTCTGGATCACGGTCATCTGGAAGAAGAACGATGGGAATCATAATCCGAAA
ACGGTATCGGACGATTGTGTCTCATCAAACCCACAAGCAGCCGCTGTCTGCGTCGCTCCGTGCGACTGCTGTTTATG
GGATCAGGGTCCACAGTGTCCTGAAGCATGATTTTAATAGCCCTTAACATCAACTTTCTGGTGCGATGCGCGCAGCA
ACGCATTCTGATTTCACTCAAATCTTTGCAGTAGGTACAACACATTATTACAATATTGTTTAATAAACCATAATTAA
AAGCGCTCCAGCCAAAACTCATATCTGATATAATCGCCCCTGCATGACCATCATACCAAAGTTTAATATAAATTAAA
TGACGTTCCCTCAAAAACACACTACCCACATACATGATCTCTTTTGGCATGTGCATATTAACAATCTGTCTGTACCA
TGGACAACGTTGGTTAATCATGCAACCCAATATAACCTTCCGGAACCACACTGCCAACACCGCTCCCCCAGCCATGC
ATTGAAGTGAACCCTGCTGATTACAATGACAATGAAGAACCCAATTCTCTCGACCGTGAATCACTTGAGAATGAAAA
ATATCTATAGTGGCACAACATAGACATAAATGCATGCATCTTCTCATAATTTTTAACTCCTCAGGATTTAGAAACAT
ATCCCAGGGAATAGGAAGCTCTTGCAGAACAGTAAAGCTGGCAGAACAAGGAAGACCACGAACACAACTTACACTAT
GCATAGTCATAGTATCACAATCTGGCAACAGCGGGTGGTCTTCAGTCATAGAAGCTCGGGTTTCATTTTCCTCACAA
CGTGGTAACTGGGCTCTGGTGTAAGGGTGATGTCTGGCGCATGATGTCGAGCGTGCGCGCAACCTTGTCATAATGGA
GTTGCTTCCTGACATTCTCGTATTTTGTATAGCAAAACGCGGCCCTGGCAGAACACACTCTTCTTCGCCTTCTATCC
TGCCGCTTAGCGTGTTCCGTGTGATAGTTCAAGTACAACCACACTCTTAAGTTGGTCAAAAGAATGCTGGCTTCAGT
TGTAATCAAAACTCCATCGCATCTAATCGTTCTGAGGAAATCATCCACGGTAGCATATGCAAATCCCAACCAAGCAA
TGCAACTGGATTGTGTTTCAAGCAGGAGAGGAGAGGGAAGAGACGGAAGAACCATGTTAATTTTTATTCCAAACGAT
CTCGCAGTACTTCAAATTGTAGATCGCGCAGATGGCATCTCTCGCCCCCACTGTGTTGGTGAAAAAGCACAGCTAGA
TCAAAAGAAATGCGATTTTCAAGGTGCTCAACGGTGGCTTCCAGCAAAGCCTCCACGCGCACATCCAAGAACAAAAG
AATACCAAAAGAAGGAGCATTTTCTAACTCCTCAATCATCATATTACATTCCTGCACCATTCCCAGATAATTTTCAG
CTTTCCAGCCTTGAATTATTCGTGTCAGTTCTTGTGGTAAATCCAATCCACACATTACAAACAGGTCCCGGAGGGCG
CCCTCCACCACCATTCTTAAACACACCCTCATAATGACAAAATATCTTGCTCCTGTGTCACCTGTAGCGAATTGAGA
ATGGCAACATCAATTGACATGCCCTTGGCTCTAAGTTCTTCTTTAAGTTCTAGTTGTAAAAACTCTCTCATATTATC
ACCAAACTGCTTAGCCAGAAGCCCCCCGGGAACAAGAGCAGGGGACGCTACAGTGCAGTACAAGCGCAGACCTCCCC
AATTGGCTCCAGCAAAAACAAGATTGGAATAAGCATATTGGGAACCGCCAGTAATATCATCGAAGTTGCTGGAAATA
TAATAAGGCAGAGTTTCTTGTAAAAATTGAATAAAAGAAAAATTTGCCAAAAAAACATTCAAAACCTCTGGGATGCA
AATGCAATAGGTTACCGCGCTGCGCTCCAACATTGTTAGTTTTGAATTAGTCTGCAAAAATAAAAAAAAAAACAAGC
GTCATATCATAGTAGCCTGACGAACAGATGGATAAATCAGTCTTTCCATCACAAGACAAGCCACAGGGTCTCCAGCT
CGACCCTCGTAAAACCTGTCATCATGATTAAACAACAGCACCGAAAGTTCCTCGCGGTGACCAGCATGAATAATTCT
TGATGAAGCATACAATCCAGACATGTTAGCATCAGTTAACGAGAAAAAACAGCCAACATAGCCTTTGGGTATAATTA
TGCTTAATCGTAAGTATAGCAAAGCCACCCCTCGCGGATACAAAGTAAAAGGCACAGGAGAATAAAAAATATAATTA
TTTCTCTGCTGCTGTTCAGGCAACGTCGCCCCCGGTCCCTCTAAATACACATACAAAGCCTCATCAGCCATGGCTTA
CCAGACAAAGTACAGCGGGCACACAAAGCACAAGCTCTAAAGTGACTCTCCAACCTCTCCACAATATATATATACAC
AAGCCCTAAACTGACGTAATGGGAGTAAAGTGTAAAAAATCCCGCCAAACCCAACACACACCCCGAAACTGCGTCAC
CAGGGAAAAGTACAGTTTCACTTCCGCAATCCCAACAGGCGTAACTTCCTCTTTCTCACGGTACGTGATATCCCACT
AACTTGCAACGTCATTTTCCCACGGTCGCACCGCCCCTTTTAGCCGTTAACCCCACAGCCAATCACCACACGATCCA
CACTTTTTAAAATCACCTCATTTACATATTGGCACCATTCCATCTATAAGGTATATTATTGATGATG

GenBank Accession No. YP_002213828 (SEQ ID NO: 220)

MTKRVRLSDSFNPVYPYEDESTSQHPFINPGFISPNGFTQSPNGVLTLKC
LTPLTTTGGSLQLKVGGGLTVDDINGELKENISATTPLVKTGHSIGLPLG
AGLGTNENKLCIKLGQGLTENSNNICIDDNINTLWTGVNPTEANCQIMNS
SESNDCKLILTLVKTGALVTAFVYVIGVSNNENMLTTHRNINFTAELFFD
STGNLLTRLSSLKTPLNHKSGQNMATGAITNAKGFMPSTTAYPFNDNSRE
KENYIYGTCYYTASDRTAFPIDISVMLNRRAINDETSYCIRITWSWNTGD
APEVQTSATTLVTSPFTFYYIREDD

GenBank Accession No. YP_002213807 (SEQ ID NO: 221)

MRRVVLGGAVVYPEGPPPSYESVMQQQQATAVMQSPLEAPFVPPRYLAPT
EGRNSIRYSELAPQYDTTRLYLVDNKSADIASLNYQNDHSNFLTTVVQNN
DFTPTEASTQTINFDERSRWGGQLKTIMHTNMPNVNEYMFSNKFKARVMV
SRKPPDGAAVGDTYDHKQDILKYEWFEFTLPEGNFSVTMTIDLMNNAIID
NYLKVGRQNGVLESDIGVKEDTRNFKLGWDPETKLIMPGVYTYEAFHPDI
VLLPGCGVDFTESRLSNLLGIRKKQPFQEGFKILYEDLEGGNIPALLDVD
AYENSKKEQKAKIEAATAAAEAKANIVASDSTRVANAGEVRGDNFAPTPV
PTAESLLADVSEGTDVKLTIQPVEKDSKNRSYNVLEDKINTAYRSWYLSY
NYGDPEKGVRSWTLLTTSDVTCGAEQVYWSLPDMMKDPVTFRSTRQVSNY
PVVGAELMPVFSKSFYNEQAVYSQQLRQSTSLTHVENRFPENQILIRPPA
PTITTVSENVPALTDHGTLPLRSSIRGVQRVTVTDARRRTCPYVYKALGI
VAPRVLSSRTF

GenBank Accession No. YP_002213812 (SEQ ID NO: 222)

MATPSMLPQWAYMHIAGQDASEYLSPGLVQFARATDTYFNLGNKFRNPTV
APTHDVTTDRSQRLMLRFVPVDREDNTYSYKVRYTLAVGDNRVLDMASTF
FDIRGVLDRGPSFKPYSGTAYNSLAPKGAPNTSQWIAEGVKNTTGEEHVT
EEETNTTTYTFGNAPVKAEAEITKEGLPVGLEVSDEESKPIYADKTYQPE
PQLGDETWTDLDGKTEKYGGRALKPDTKMKPCYGSFAKPTNVKGGQAKQK
TTEQPNQKVEYDIDMEFFDAASQKINLSPKIVMYAENVNLETPDTHVVYK
PGTEDTSSEANLGQQSMPNRPNYIGFRDNFIGLMYYNSTGNMGVLAGQAS
QLNAVVDLQDRNTELSYQLLLDSLGDRTRYFSMWNQAVDSYDPDVRVIEN
HGVEDELPNYCFPLDGIGVPTTSYKSIVPNGDNAPNWKEPEVNGTSEIGQ
GNLFAMEINLQANLWRSFLYSNVALYLPDSYKYTPSNVILPENKNTYDYM
NGRVVPPSLVDTYVNIGARWSLDAMDNVNPENHHRNAGLRYRSMLLGNGR
YVPFHIQVPQKFFAVKNLLLLPGSYTYEWNFRKDVNMVLQSSLGNDLRVD
GASISFTSINLYATFFPMAHNTASTLEAMLRNDTNDQSENDYLSAANMLY
PIPANATNIPISIPSRNWAAFRGWSFTRLKTKETPSLGSGFDPYFVYSGS
IPYLDGTFYLNHTFKKVSIMFDSSVSWPGNDRLLSPNEFEIKRTVDGEGY
NVAQCNMTKDWFLVQMLANYNIGYQGFYIPEGYKDRMYSFFRNFQPMSRQ
VVDEVNYKDFKAVAIPYQHNNSGFVGYMAPTMRQGQPYPANYPYPLIGTT
AVNSVTQKKFLCDRIMWRIPFSSNFMSMGALTDLGQNMLYANSAHALDMT
FEVDPMDEPTLLYLLFEVFDVVRVHQPHRGIIEAVYLRTPFSAGNATT

GenBank Accession No. AY803294 (SEQ ID NO: 202)

CATCATCAATAATATACCTTATAGATGGAATGGTGCCAATATGTAAATGAGGTGATTTTAAAAAGTGTGGGCTGTGT
GGTAATTGGCTGTGGGGTTAACGGCTAAAAGGGGCGGCGCGGCCGTGGGAAAATGACGTTTTTTGGGGGTGGAGTGT
TTTTGCAAGTTGTCGCGGTAAATGTGACGCAAACAAAGGCTTTTTTTTTACGGAACTACTTAGTGTTCCCACGGTAT
TTAACAGGAAATGAGGTAGTTTTGGCCGGATGCAAGTAAAAATTGTTCATTTTCGCGCGAAAACTGAATGAGGAAGT
GGTTTTCTGAATAATGCGGTATTTATGGCAGGGTGGAGTATTTGTTCAGGGCCAGGTAGACTTTGACCCATTACGTG
GAGGTTTCGATTACCGCGGAGGTTTCGATTACCGTGTTTTTTACCTAAATTTCCGCGTACCGTGTGAAAGTCTTCTG
TTTTTACGTAGGTGTCAGCTGATCGCTACGGTATTTATACCTCAGGGTTTGTGTCAAGAGGCCACTCTTGAGTGCCA
GCGAGAAGAGTTTTCTCCTCTGCGCCGGCAGTTTAATATTAAAAAAAATGAGACACTTGCGATTTATGCCTCAGGAA
ATAATTTCTGCTGAGACTGGAAACGAAATACTGGAGTTTGTGGTGCACGCCCTGATGGGAGACGATCCGGAGCCACC
TGTGCAGCTTTTTGAGCCTCCTACGCTTCAGGAACTGTATGATTTAGAGGTAGAGGGATCGGAGGATTCTAATGAGG
AAGCTGTGAATGGCTTTTTTACCGATTCTATGCTTTTAGCTGCTAATGAAGGATTAGAATTAGATCCGCCTTTGGAC
ACTTTCGATACTCCAGGGGTGATTGTGGAAAGCGGTACAGCTGTAAGAAAATTACCTGATTTGGGTTCCGTGGACTG
TGATTTGCACTGCTATGAAGACGGGTTTCCTTTGAGTGATGAGGAGGACCATGAAAAGGAGCAGTCTATGCAGACTG
CAGCGGGTGAGGGAGTGAAGGCTGCCATTGGTTTTCAGTTGGATTGCCCGGAGCTTCCTGGACATGGCTGTAAGTCT
TGTGAATTTCACAGGAAAAATACTGGAGTAAAGGAACTGTTATGTTCGCTTTGTTATATGAGAGCGCACTGCCACTT
TATTTACAGTAAGTGTGTTTAAGTTAAAATTTAAAGGAATATGCTGTTTTTCACATGTATATTGAGTGGGAAATTTG
TGCTTCTTATTATAGGTCCTGTGTCTGATGCTGATGAGTCACCATCTCCTGATTCTACTACCTCACCTCCTGAGATT
CAAGCACCTGTTCCTGTGGACGTGCACAAGCCCATTCCTGTAAAGCTTAAGCCTGGAAAACGTCCAGCAGTGGAAAA
ACTCGAGGACTTGTTACAGGGTGGGGACGGACCTTTGGACTTGAGTACACGGAAACGGCCAAGACAATAAGTGTTCC
ATATCCGTGTTTACTTAAGGTGACGTCAATATTTGTGTGAGAGTGCAATGTAATAAAAATATGTTAACTGTGTACTG
GTTTTTATTGCTTTTTGGGGGGGGACTCAGGTATATAAGTAGAAGCAGACCTGTGTGGTTAGCTCATAGAAGCTGGC
TTTGATTCATGGAGGTTTGGGCCATTTTGGAAGACCTTAGAAAGACTAGGCAACTGTTAGAGAACGCTTCGGACGGA
GTCTCCGGTTTTTGGAGATTCTGGTTCGCTAGTGAATTAGCTAGGGTAGTTTTTAGGATAAAACAGGACTATAAAGA
AGAATTTGAAAAGTTGTTGGTAGATTGTCCAGGACTTTTTGAAGCTCTTAATTTGGGCCATCAAGTTCACTTTAAAG
AAAAAGTTTTATCAGTTTTAGACTTTTCGACCCCAGGTAGAACTGCCGCTGCTGTGGCTTTTCTTACTTTTATATTA
GATAAATGGATCCCGCAGACTCATTTCAGCAGGGGATACGTTTTGGATTTCGTAGCCACAGCATTGTGGAGAACATG
GAAGGTTCGCAAGATGAGGACAATCTTAGGTTACTGGCCAGTGCAGCCTTTGGGTGTAGCGGGAATCCTGAGGCATC
CACCGGTCATGCCAGCGGTTCTGGAGGAGGAACAGCAAGAGGACAACCCGAGAGCCGGCCTGGACCCTCCAGTGGAG
GAGGCGGAGTAGCTGACTTGTCTCCTGAACTGCAACGGGTGCTTACTGGATCTACGTCCACTGGACGGGATAGGGGC
GTTAAAAGGGAGAGGGCATCTAGTGGTACTGATGCTAGATCTGAGTTGGCTTTAAGTTTAATGAGTCGCAGACGTCC
TGAAACCATTTGGTGGCATGAGGTCCAGAAAGAGGGAAGGGATGAAGTTTCTGTATTGCAGGAGAAATATTCACTGG
AACAGGTGAAAACATGTTGGTTGGAGCCTGAGGATGATTGGGAGGTGGCCATTAAAAATTATGCCAAGATAGCTTTG
AGGCCTGATAAACAGTATAAGATTACTAGACGGATTAATATCCGGAATGCTTGTTACATATCTGGAAATGGGGCTGA
GGTGGTAATAGATACTCCAGACAAGACAGTTATTAGATGCTGCATGATGGATATGTGGCCTGGAGTAGTCGGTATGG
AAGCAGTAACTTTTGTAAATGTTAAGTTTAGGGGAGATGGTTATAATGGAATAGTGTTTATGGCCAATACCAAACTT
ATATTGCATGGTTGTAGCTTTTTTGGTTTTAACAATACCTGTGTAGATGCCTGGGGACAGGTTAGTGTACGGGGATG
TAGTTTCTATGCGTGTTGGATTGCCACAGCTGGCAGAACCAAGAGTCAATTGTCTCTGAAGAAATGCATATTCCAAA
GATGTAACCTGGGCATTCTTAATGAAGGCGAAGCAAGGGTCCGCCACTGCGCTTCTACAGATACTGGATGTTTTATT
TTAATTAAGGGCAATGCCAGCGTAAAGCATAACATGATTTGCGGTGCTTCCGATGAGAGGCCTTATCAAATGCTCAC
TTGTGCCGGAGGGCATTGTAACATGCTGGCTACTGTGCATATTGTTTCTCATCAACGCAAAAAATGGCCTGTTTTTG
ATCACAATGTGTTGACCAAGTGTACCATGCATGCAGGTGGGCGTAGAGGAATGTTTATGCCTTACCAGTGTAACATG
AATCATGTAAAAGTGTTGTTGGAACCAGATGCCTTTTCCAGAATGAGTCTAACAGGAATGTTTGACATGAACATGCA
AATCTGGAAGATCCTGAGGTATGATGATACAAGATCGAGGGTGCGCGCATGCGAATGCGGAGGCAAGCATGCCAGGT
TCCAGCCGGTGTGTGTAGATGTGACTGAAGATCTGAGACCGGATCATTTGGTTATTGCCCGCACTGGAGCAGAGTTC
GGATCCAGTGGAGAAGAAACTGACTAAGGTGAGTATTGGGAAAACTTTGGGGTGGGATTTTCAGATGGACAGATTGA
GTAAAAATTTGTTTTTCTGTCTTGCAGCTGTCATGAGTGGAAACGCTTCTTTTAATGGGGGAGTCTTCAGCCCTTAT
CTGACAGGGCGTCTCCCATCCTGGGCAGGAGTTCGTCAGAATGTTATGGGATCTACTGTGGATGGAAGACCCGTCCA
ACCCGCCAATTCTTCAACGCTGACCTATGCTACTTTAAGTTCTTCACCTTTGGACGCAGCTGCAGCCGCCGCTGCCG
CCTCTGTTGCCGCTAACACTGTGCTTGGAATGGGTTACTATGGAAGCATCCTGGCTAATTCCACTTCCTCTAATAAC
CCTTCTACCCTGACTCAGGACAAGTTACTTGTCCTTTTGGCCCAGCTGGAGGCTTTGACCCAACGTCTGGGTGAACT
TTCTCAGCAGGTGGCCGAGTTGCGAGTACAAACTGAGTCTGCTGTCGGCACGGCAAAGTCTAAATAAAAAAAAAAAA
TTCCAGAATCAATGAATAAATAAACGAGCTTGTTGTTGATTTAAAATCAAGTGTTTTTTATTTCATTTTTCGCGCAC
GGTATGCCCTAGACCACCGATCTCGATCATTGAGAACACGGTGGATTTTTTCCAAAATCCTATAAAGGTGGGATTGA
ATGTTTAGATACATGGGCATTAGGCCGTCTTTGGGGTGGAGATAGCTCCATTGAAGGGATTCATGCTCCGGGGTAGT
GTTGTAAATTACCCAGTCATAACAAGGTCGCTGTGCATGGTGTTGCACAATATCTTTTAGAAGTAGGCTGATTGCCA
CAGATAAGCCCTTGGTGTAGGTGTTTACAAACCGGTTGAGCTGGGAGGGGTGCATTCGGGGTGAAATTATGTGCATT
TTGGATTGGATTTTTAAGTTGGCAATATTGCCGCCAAGATCTCGTCTTGGGTTCATGTTATGAAGTACCACCAAGAC
GGTGTATCCGGTACATTTAGGAAATTTATCGTGCAGCTTGGATGGAAAAGCGTGGAAAAATTTGGAGACACCCTTGT
GTCCTCCGAGATTTTCCATGCACTCATCCATGATAATAGCAATAGGGCCGTGGGCAGCAGCGCGGGCAAACACGTTC
CGTGGGTCTGACACATCATAGTTATGTTCCTGAGTTAAATCATCATAGGCCATTTTAATAAATTTGGGACGGAGAGT
ACCCGATTGGGGTATGAATGTTCCTTCGGGCCCCGGAGCATAGTTCCCCTCACAGATTTGCATTTCCCAAGCTTTCA
GTTCCGAGGGTGGAATCATGTCCACCTGGGGGGCTATAAAGAACACCGTTTCTGGGGCTGGGGTAATTAGTTGGGAT
GATAGCAAGTTTCTGAGCAATTGAGATTTGCCACATCCGGTGGGGCCATAAATGATTCCGATTACAGGTTGCAGTTG
GTAGTTTAGGGAACGGCAACTGCCGTCTTCTCGAAGCAAGGGGGCCACCTCGTTCATCATTTCCCTTACATGCATAT
TTTCCCGCACCAAATCCATTAGGAGGCGCTCTCCTCCTAGTGATAGAAGTTCTTGTAGTGAGGAAAAGTTTTTCAGC
GGTTTTAGACCGTCAGCCATGGGCATTTTGGAGAGAGTCTGTTGCAAAAGTTCTAGTCTGTTCCACAGTTCAGTGAT
GTGTTCTATGGCATCTCGATCCAGCAGACCTCCTCGTTTCGCGGGTTTGGACGGCTCCTGGAGTAGGGTATGAGACG
ATGGGCGTCCAGCGCTGCCAGGGTTCGGTCCTTCCAGGGTCTCAAAGTTCGGGTCAGGGTTGTTTCCGTCACAGTGA
AGGGGTGTGCGCCTGCTTGGGCGCTTGCCAGGGTGCGCTTCAGACTCATCCTGCTGGTCGAAAACTTGTGCCGCTTG
GCGCCCTGTATGTCGGCCAAGTAGCAGTTTACCATGAGTTCGTAGTTGAGCGCCTCGGCTGCGTGGCCCTTGGCGCG
GAGCTTACCTTTGGAAGTTTTCTTGCATACCGGGCAGTATAGGCATTTCAGCGCATACAGCTTGGGCGCAAGGAAAA
TGGATTCTGGGGAGTATGCATCCGCGCCGCAGGAGGCGCAAACAGTTTCACATTCCACCAGCCAGGTTAAATCCGGT
TCATTGGGGTCAAAAACAAGTTTTCCGCCATATTTTTTGATGCGTTTCTTACCTTTGGTCTCCATGAGTTCGTGTCC
TCGTTGAGTGACAAACAGGCTGTCCGTGTCCCCGTAGACTGATTTTACAGGCCTCTTTTCCAGTGGAGTGCCTCGGT
CTTCTTCGTATAGGAACTCTGACCACTCTGATACAAAGGCGCGCGTCCAGGCCAGCACAAAGGAGGCTATGTGGGAG
GGGTAGCGATCGTTGTCAACCAGGGGGTCCACCTTTTCCAAAGTATGCAAACACATGTCACTCTCTTCAACATCCAG
GAATGTGATTGGCTTGTAGGTGTATTTCACGTGACCTGGGGTCCCAGCTGGGGGGGTATAAAAGGGGGCGGTTCTCT
GCTCTTCCTCACTGTCTTCCGGATCGCTGTCCAGGAACGTCAGCTGTTGGGGTAGGTATTCCCTCTCGAAGGCGGGC
ATGACCTCTGCACTCAGGTTGTCAGTTTCTAAGAACGAGGAGGATTTGATATTGACAGTGCCGCTTGAGATGCCTTT
CATGAGGTTTTCGTCCATTTGGTCAGAAAACACAATTTTTTTATTGTCAAGTTTGGTGGCAAATGATCCATACAGGG
CGTTGGATAAAAGTTTGGCAATGGATCGCATGGTTTGGTTCTTTTCCTTGTCCGCGCGCTCTTTGGCAGCGATGTTG
AGTTGGACATATTCGCGTGCCAGGCACTTCCATTCGGGGAAGATAGTTGTCAATTCATCTGGCACAATTCTCACTTG
CCACCCTCGGTTATGCAAGGTAATTAAATCCACACTGGTGGCCACCTCGCCTCGAAGGGGTTCGTTGGTCCAGCAGA
GCCTACCTCCTTTCCTAGAACAGAAAGGTGGAAGTGGGTCTAGCATAAGTTCATCGGGAGGGTCTGCATCCATGGTA
AAGATTCCAGGAAGTAAATCCTTATCAAAATAGCTGATGGGAGTGGGGTCATCTAAGGCCATTTGCCATTCTCGAGC
TGCCAGTGCGCGCTCATATGGGTTAAGGGGACTGCCCCAGGGCATGGGATGGGTGAGTGCAGAGGCATACATGCCAC
AGATGTCATAGACGTAGATGGGATCCTCAAAGATGCCTATGTAGGTTGGATAGCATCGCCCCCCTCTGATACTTGCT
CGCACATAGTCATATAGTTCATGTGACGGCGCTAGCAGCCCCGGACCCAAGTTGGTGCGATTGGGTTTTTCTGTTCT
GTAGACAATCTGGCGAAAGATGGCGTGAGAATTGGAAGAGATGGTGGGTCTTTGAAAAATGTTGAAGTGGGCATGAG
GTAGACCTACAGAGTCTCTGATAAAGTGGGCATAAGATTCTTCAAGCTTGGTTACCAGTTGGGCGGTGACAAGTACG
TCCAGGGCGCAGTAGTCAAGTGTTTCTTGAATGATGTCATAACCTGGTTGGTTTTTCTTTTCCCACAGTTCGCGGTT
GAGAAGGTATTCTTCGCGATCCTTCCAGTACTCTTCTAGCGGAAACCCGTCTTTGTCTGCACGGTAAGATCCTAGCA
TGTAGAACTGATTAACTGCCTTGTAAGGGCAGCAGCCCTTCTCTACGGGTAGAGAGTATGCTTGAGCAGCTTTTCGT
AGCGAAGCGTGAGTAAGGGCGAAGGTGTCTCTAACCATGACTTTGACAAATTGGTATTTAAAGTCCATGTCGTCACA
GGCTCCCTGTTCCCAGAGTTGGAAGTCTACCCGTTTCTTGTAGGCGGGGTTGGGCAAAGCGAAAGTAACATCGTTGA
AGAGAATCTTACCGGCTCTGGGCATAAAATTGCGAGTGATGCGAAAAGGCTGTGGTACTTCCGCTCGATTGTTGATC
ACCTGGGCAGCTAGGACGATCTCGTCGAAGCCGTTGATGTTGTGTCCTACAATGTATAATTCTATGAAACGCGGCGT
GCCTCTGACGTGAGGTAGCTTATTGAGCTCATCAAAGGTTAGGTCTGTAGGGTCAGATAAGGCGTAGTGTTCAAGGG
CCCATTCGTGCAGATGAGGATTTGCATGTAGGAATGATGACCAAAGATCCACCGCCAGTGCTGTTTGTAACTGGTCC
CGATACTGACGAAAATGCTGGCCAATTGCCATTTTTTCTGGAGTGACACAGTAGAAGGTTCCGGGATCTTGTTGCCA
TCGATCCCACTTAAGTTTAATGGCTAGATCGTGGGCCATGTTGACGAGACGCTCTTCTCCTGAGAGTTTCATGACCA
GCATGAAAGGAACTAGTTGTTTGCCAAAGGACCCCATCCAGGTGTAAGTTTCCACATCGTAGGTCAGGAAGAGTCTT
TCTGTGCGAGGATGAGAGCCGATTGGGAAAAACTGGATTTCCTGCCACCAGTTGGAGGATTGGCTGTTGATGTGATG
GAAGTAGAAGTTTCTGCGGCGCGCCGAGCATTCGTGTTTGTGCTTGTACAGACGGCCGCAGTAGTCGCAGCGTTGCA
CGGGTTGTATCTCGTGAATGAGCTGTACCTGGCTTCCCTTGACGAGAAATTTCAGTGGGAAGCCGAGGCCTGGCGAT
TGTATCTCGTGCTCTTCTATATTCGCTGTATTGGCCTGTTCATCTTCTGTTTCGATGGTGGTCATGCTGACGAGCCC
CCGCGGGAGGCAAGTCCAGACCTCGGCGCGGGAGGGGCGGAGCTGAAGGACGAGAGCGCGCAGGCTGGAGCTGTCCA
GAGTCCTGAGACGCTGCGGACTCAGGTTAGTAGGTAGGGACAGAAGATTAACTTGCATGATCTTTTCCAGGGCGTGC
GGGAGGTTTAGATGGTACTTGATTTCCACAGGTTCGTTTGTAGAGACGTCAATGGCTTGCAGGGTTCCGTGTCCTTT
GGGTGCCACTACCGTACCTTTGTTTTTTCTTTTGATCGGTGGTGGCTCTCTTGCTTCTTGCATGCTTAAAAGCGGTG
ACGGGGACGCGCGCCGGGCGGCAGCGGTTGTTCCGGACCCGGGGGCATGGCTGGTAGTGGCACGTCGGCGCCGCGCA
CGGGCAGGTTCTGGTACTGCGCTCTGAGAAGACTTGCGTGCGCCACCACGCGTCGATTGACGTCTTGTATCTGACGT
CTTTGGGTGAAAGCTACCGGCCCCGTGAGCTTGAACCTGAAAGAGAGTTCAACAGAATCAATTTCGGTATCGTTAAC
GGCAGCTTGTCTCAGTATTTCTTGTACGTCACCAGAGTTGTCCTGGTAGGCGATCTCCGCCATGAACTGCTCGATTT
CTTCCTCCTGAAGATCTCCGCGACCCGCTCTCTCGACGGTGGCCGCGAGGTCATTGGAGATACGGCCCATGAGTTGG
GAGAATGCATTCATGCCCGCCTCGTTCCAGACGCGGCTGTAAACCACGGCCCCCTCGGAGTCTCTTGCGCGCATCAC
CACCTGAGCGAGGTTAAGCTCCACGTGTCTGGTGAAGACCGCATAGTTGCATAGGCGCTGAAAAAGGTAGTTGAGTG
TGGTGGCGATGTGTTCGGCGACAAAGAAATACATGATCCATCGTCTCAGCGGCATTTCGCTGACATCGCCCAGAGCT
TCCAAGCGCTCCATGGCCTCGTAGAAGTCCACGGCAAAATTAAAAAACTGGGAGTTTCGCGCGGACACGGTCAATTC
CTCCTCGAGAAGACGGATGAGTTCGGCTATGGTGGCCCGTACTTCGCGTTCGAAGGCTCCCGGCATCTCTTCTTCCT
CTTCTATCTCTTCTTCCACTAACATCTCTTCTTCGTCTTCAGGCGGGGGCGGAGGGGGCACGCGGCGACGTCGACGG
CGCACGGGCAAACGGTCGATGAATCGTTCAATGACCTCTCCGCGGCGGCGGCGCATGGTTTCAGTGACGGCGCGGCC
GTTCTCGCGCGGTCGCAGAGTAAAAACACCGCCGCGCATCTCCTTAAAGTGGTGACTGGGAGGTTCTCCGTTTGGGA
GGGAAAGGGCGCTGATTATACATTTTATTAATTGGCCCGTAGGGACTGCGCGCAGAGATCTAATCGTGTCAAGATCC
ACGGGATCTGAAAACCTTTCAACGAAAGCGTCTAACCAGTCACAGTCACAAGGTAGGCTGAGTACGGCTTCTTGTGG
GCGGGGGTGGTTATGTGTTCGGTCTGGGTCTTCTATTCCTTCTTCATCTCGGGAAGGTGAGACGATGCTGCTGGTGA
TGAAATTAAAGTAGGCAGTTCTAAGACGGCGGATGGTGGCGAGGAGCACCAGGTCTTTGGGTCCGGCTTGCTGGATA
CGCAGGCGATTGGCCATTCCCCAAGCATTATCCTGACATCTAGCCAGATCTTTGTAGTAGTCTTGCATGAGCCGTTC
TACGGGCACTTCTTCTTCACCCGTTCTGCCATGCATACGTGTGAGTCCAAACCCGCGCATTGGTTGGACCAGTGCCA
AGTCAGCTACAACTCTTTCGGCGAGGATGGCTTGCTGTACTTGGGTGAGGGTGGCTTGAAAGTCATCAAAATCCACG
AAGCGGTGGTAAGCCCCGGTATTGATGGTGTAAGCACAGTTGGCCATGACTGACCAGTTAACTGTTTGGTGACCATG
GCGCACGAGCTCGGTGTATTTAAGGCGCGAATAGGCGCGGGTGTCAAAAATGTAATCGTTGCAGGTGCGCACCAGAT
ACTGGTACCCTATAAGAAAATGCGGTGGTGGTTGGCGGTAGAGAGGCCATTGTTCTGTAGCTGGAGCGCCGGGGGCG
AGGTCTTCCAACATAAGGCGGTGATAGCCGTAGATGTACCTGGACATCCAGGTGATTCCTGCGGCGGTAGTGGAAGC
CCGAGGAAACTCGCGTACGCGGTTCCAAATGTTGCGTAGCGGCATGAAGTAGTTCATTGTAGGCACGGTTTGACCAG
TGAGGCGCGCGCAGTCATTGATGCTCTATAGACACGAAGAAAATGAAAGCGTTCAGCGACTCGACTCTGTAGCCTGG
AGGAACGTGAACGGGTTGGGTCGCGGTGTACCCCGGTTCAAGACTTGTACTCGAGCCGGCCGGAGCCGCGGCTAACG
TGGTATTGGCACTCCCGTCTCGACCCAGCCTACAAAAATCCAGGATACGGAATCGAGTCGTTTTGCTGGTTGCTGAA
TGGCAGGGAAGTGAGTCCTATTTTTTTTTTTGCCGCTCAGATGCATCCCGTGCTGCGACAGATGCGTCCCCAACAAC
AGCCCCCCTCGCAGCAGCAGCAACCACAAAAGGCTGTCCCTGCAACTACTGCAACTGCCGCCGTGAGCGGTGCGGGA
CAGCCCGCCTATGATCTGGACTTGGAAGAGGGCGAAGGACTGGCACGTCTAGGTGCGCCCTCGCCCGAGCGGCATCC
GCGAGTTCAACTGAAAAAAGATTCTCGCGAGGCGTATGTGCCCCAACAGAACCTATTTAGAGACAGAAGCGGCGAGG
AGCCGGAGGAGATGCGAGCTTCCCGCTTTAACGCGGGTCGTGAGCTGCGTCACGGTTTGGACCGAAGACGAGTGTTG
CGGGACGAGGATTTCGAAGTTGATGAAGTGACAGGGATCAGTCCTGCCAGGGCACACGTGGCTGCAGCCAACCTTGT
ATCGGCTTACGAGCAGACAGTAAAGGAAGAGCGTAACTTCCAAAAGTCTTTTAATAATCATGTGCGAACCCTGATTG
CCCGCGAAGAAGTTACTCTTGGTTTGATGCATTTGTGGGATTTGATGGAAGCTATCATTCAGAACCCTACTAGCAAA
CCTCTGACCGCACAGCTGTTTCTGGTGGTGCAACACAGCAGAGACAACGAGGCTTTCAGAGAGGCACTGCTCAACAT
CACTGAACCCGAGGGGAGATGGTTGTATGATCTTATCAACATTCTACAGAGTATCATAGTGCAGGAGCGGAGCCTGG
GCCTGGCCGAAAAGGTGGCTGCCATCAATTACTCGGTTTTAAGTTTGGGAAAATATTACGCTCGCAAGATCTACAAG
ACTCCATACGTTCCCATAGACAAGGAGGTGAAGATAGATGGGTTCTACATGCGTATGACGCTCAAGGTCTTGACCCT
GAGCGATGATCTTGGGGTGTACCGCAATGACAGAATGCATCGCGCCGTTAGCGCCAGTAGGAGGCGCGAGTTAAGCG
ACAGGGAACTGATGCACAGTTTGCAAAGAGCTCTGACTGGAGCTGGAACAGAGGGTGAGAATTACTTTGACATGGGA
GCTGACTTGCAGTGGCAGCCTAGTCGCAGGGCTCTGAGCGCCGCGACGGCAGGATGTGAGCTTCCTTACATAGAAGA
GGCGGATGAAGGCGAGGAGGAAGAGGGCGAGTACTTGGAAGACTGATGGCACAACCCGTGTTTTTTGCTAGATGGAA
CAGCAAGCACCGGATCCCGCAACGCGGGCGGCGCTGCAGAGCCAGCCGTCCGGCATTAACTCCTCGGACGATTGGAC
CCAGGCCATGCAACGTATCATGGCGTTGACGACTCGCAACCCCGAAGCCTTTAGACAGCAACCCCAGGCCAACCGTC
TATCGGCCATCATGGAAGCTGTAGTGCCTTCCCGCTCTAATCCCACTCATGAGAAGGTCCTGGCCATTGTAAACGCG
TTGGTGGAGAACAAAGCTATTCGTCCAGATGAGGCCGGACTGGTATACAACGCTCTTTTAGAACGCGTGGCTCGCTA
CAACAGTAGCAATGTGCAAACCAATTTGGACCGTATGATAACAGATGTACGCGAAGCCGTGTCTCAGCGTGAAAGGT
TCCAGCGCGATGCCAACCTTGGTTCGCTGGTGGCGTTAAATGCTTTTTTGAGTACTCAGCCTGCTAATGTGCCGCGT
GGTCAACAGGATTATACTAACTTTTTGAGTGCGTTGAGACTGATGGTATCTGAAGTACCTCAGAGCGAAGTGTATCA
GTCCGGACCTGACTACTTCTTTCAGACTAGCAGACAGGGTTTGCAGACGGTAAATCTGAGCCAAGCTTTTAAAAACC
TTAAAGGTTTGTGGGGAGTGCATGCCCCGGTAGGAGAAAGAGCAACCGTGTCTAGCTTGTTAACTCCAAACTCCCGC
CTATTACTACTGTTGGTAGCTCCTTTCACCGACAGCGGCAGCATCGACCGTAATTCCTATTTGGGTTACCTACTAAA
CCTGTATCGCGAAGCCATAGGGCAAAGCCAGGTGGACGAGCAGACCTATCAAGAAATTACCCAAGTCAGTCGCGCTT
TGGGTCAGGAAGACACTGGCAGTTTGGAAGCCACTCTGAACTTCTTGCTTACCAATCGGTCTCAGAAGATCCCTCCT
CAATATGCTCTTACTGCGGAGGAGGAGAGGATCCTTAGATATGTGCAGCAGAGCGTGGGATTGTTTCTGATGCAAGA
GGGGGCAACTCCGACTGCGGCATTGGACATGACAGCGCGAAATATGGAGCCCAGCATGTATGCCAGTAACCGGCCTT
TCATTAACAAACTGCTGGACTACTTGCACAGAGCTGCCGCTATGAACTCTGATTATTTTACCAATGCCATCCTAAAC
CCGCACTGGCTGCCCCCACCTGGTTTCTACACGGGCGAATATGACATGCCCGACCCTAATGACGGGTTTCTGTGGGA
CGACGTGGACAGTAATGTTTTTTCACCTCTTTTTGATCATCGCACGTGGAAAAAGGAAGGCGGCGATAGAATGCATT
CTTCTGCATCGCTGTCCGGGGTCATGGGTGCTACCGCGGCTGAGCCCGAGTCTGCAAGTCCTTTTCCTAGTCTACCC
TTTTCTCTACACAGTGTACGTAGCAGCGAAGTGGGTAGAATAAGTCGCCCGAGTTTAATGGGCGAAGAGGAATACCT
AAACGATTCCTTGCTCAGACCGGCGAGAGAAAAAAATTTCCCAAACAATGGAATAGAAAGTTTGGTGGATAAGATGA
GTAGATGGAAGACTTATGCTCAGGATCACAGAGACGAGCCTGGGATCATGGGGACTACAAGTAGAGCGAGCCGTAGA
CGCCAGCGTCATGACAGACAGAGGGGTCTTGTGTGGGAAGATGAGGATTCGGCCGATGATAGCAGCGTGTTGGACTT
GGGTGGGAGAGGAAGGGGCAACCCGTTTGCTCATTTGCGCCCTCGCTTGGGTGGTATGTTGTAAAAAAAAAATAAAA
AGGAAAACTCACCAAGGCCATGGCGACGAGCGTACGTTCGTTCTTCTTTATTATTTGTGTCTAGTATAATGAGGCGA
GTCGTGCTAGGCGGAGCGGTGGTGTATCCGGAGGGTCCTCCTCCTTCGTACGAGAGCGTGATGCAGCAGCAGCAGGC
GACGGCGGTGATGCAATCCCCACTGGAGGCTCCCTTTGTACCTCCGCGATACCTGGCACCTACGGAGGGCAGAAACA
GCATTCGTTACTCGGAACTGGCACCTCAGTACGATACCACCAGGTTGTATCTGGTGGACAACAAGTCGGCGGACATT
GCTTCTCTGAACTATCAGAATGACCACAGCAACTTCTTGACCACGGTGGTGCAGAACAATGACTTTACCCCTACGGA
AGCCAGTACCCAGACCATTAACTTTGATGAACGATCGCGGTGGGGCGGTCAGCTAAAGACCATCATGCATACTAACA
TGCCCAACGTAAACGAGTATATGTTTAGTAACAACTTCAAAGCGCGTGTGATGGTGTCCAGAAAACCTCCCGAAGGT
GCTGCAGTTGGGGATACATATGATCACAAGCAGGATATTTTGGAATATGAGTGGTTCGAGTTTACTTTGCCAGAAGG
CAACTTTTCAGTTACTATGACCATTGATTTGATGAACAATGCCATCATAGATAACTACTTGAAAGTGGGCAGACAGA
ATGGAGTGCTTGAAAGTGACATTGGTGTTAAGTTCGACACCAGGAACTTCAAGCTGGGATGGGATCCCGAAACCAAG
TTGATTATGCCTGGAGTGTATACGTATGAAGCCTTTCATCCTGACATTGTCTTACTGCCTGGCTGTGGAGTGGACTT
TACCGAAAGTCGTTTGAGCAACCTTCTTGGTATCAGAAAAAAACAGCCATTTCAAGAGGGTTTTAAGATTTTGTATG
AAGATTTAGAAGGAGGTAATATTCCGGCCCTCTTGGATGTAGATGCCTATGAGAACAGTAAGAAAGAACAAAAAGCC
AAAATAGAAGCTGCTGCGGAAGCTAAGGCAAACATAGTTGCCAGCGACTTTACAAGGGTTGCTAACGCTGGAGAGGT
CAGAGGAGACAATTTTGCACCAACACCTGTTCCGACTGCAGAATCATTATTGGCCGATGTAACTGGAGGAACGGACG
TGAAACTCACTATTCAACCTGTAGAAAAAGATAGTAAGAATAGAAGCTATAATGTGTTGGAAGATAAAATCAACACA
GCCTATCGCAGTTGGTACCTTTCGTACAATTATGGCGATCCCGAAAAAGGAGTGCGTTCCTGGACATTGCTCACCAC
CTCAGATGTCACCTGCGGAGCAGAGCAGGTCTACTGGTCGCTTCCAGACATGATGCAGGATCCTGTCACTTTCCGCT
CCACTAGACAAGTCAGCAACTACCCTGTGGTGGGTGCAGAGCTTATGCCCGTCTTCTCAAAGAGCTTCTACAACGAA
CAAGCTGTGTACTCCCAGCAGCTCCGCCAGTCCACCTCGCTTACGCACGTCTTCAACCGCTTTCCTGAGAACCAGAT
TTTAATCCGTCCGCCGGCGCCCACCATTACCACCGTCAGTGAAAACGTTCCTGCTCTCACAGATCACGGGACCCTGC
CGTTGCGCAGCAGTATCCGGGGAGTCCAACGTGTGACCGTTACTGACGCCAGACGCCGCACCTGTCCCTACGTGTAC
AAGGCACTGGGCATAGTCGCACCGCGCGTCCTTTCAAGCCGCACTTTCTAAAAAAATGTCCATTCTTATCTCGCCCA
GTAATAACACCGGTTGGGGTCTGCGCGCTCCAAGCAAGATGTACGGAGGCGCACGCAAACGTTCTACCCAACATCCC
GTGCGTGTTCGCGGTCATTTTCGCGCTCCATGGGGTGCCCTCAAGGGCCGCACTCGCGTTCGAACCACCGTCGATGA
TGTAATCGATGAGGTGGTTGCCGACGCCCGTAATTATACTCCTACTGCGCCTACATCTACTGTGGATGCAGTTATTG
ACAGTGTAGTGGCTGACGCTCGCAACTATGCTCGACGTAAGAGCCGGCGAAGGCGCATTGCCAGACGCCACCGAGCT
ACCACTGCCATGCGAGCCGCAAGAGCTCTGCTACGAAGAGCTAGACGCGTGGGACGAAGAGCCATGCTTAGGGCGGC
CAGACGTGCAGCTTCGGGCGCCAGCGCCGGCAGGTCCCGCAGGCAAGCAGCCGCTGTCGCAGCGGCGACTATTGCCG
ACATGGCCCAAACGCGAAGAGGCAATGTATACTGGGTGCGTGACGCTGCCACCGGTCAACGTGTACCCGTGCGCACC
CGTCCCCCTCGCACTTAGAAGATACTGAGCAGTCTCCGATGTTGTGTCCCAGCGGCGAGGATGTCCAAGCGCAAATA
CAAGGAAGAAATGCTGCAGGTTATCGCACCTGAAGTCTACGGCCAACCGCTGAAGGATGAAAAAAAACCCCGCAAAA
TCAAGCGGGCTAAAAAGGACAAAAAAGAAGAGGAAGATGGCGATGATGGGCTGGCGGAGTTTGTGCGCGAGTTTGCC
CCACGGCGACGCGTGCAATGGCGTGGACGCAAAGTTCGACATTTGTTGAGACCTGGAACTTCGGTGGTCTTTACACC
CGGCGAGCGTTCAAGCGCTACTTTTAAGCGTTCCTATGATGAGGTGTACGGGGATGATGATATTCTTGAGCAGGCGG
CTGACCGATTAGGCGAGTTTGCTTATGGCAAGCGTAGTAGAATAAATCCCAAGGATGAGACAGTGTCCATACCCTTG
GATCATGGAAATCCCACCCCTAGTCTTAAACCGGTCACTTTGCAGCAAGTGTTACCCGTAACTCCGCGAACAGGTGT
TAAACGCGAAGGTGAAGATTTGTATCCCACTATGCAACTAATGGTACCCAAACGCCAAAAGTTGGAGGACGTTTTGG
AGAAAGTAAAAGTGGATCCAGATATTCAACCTGAGGTTAAAGTGAGACCCATTAAGCAGGTAGCGCCTGGTCTGGGA
GTACAAACTGTAGACATTAAGATTCCCACTGAAAGTATGGAAGTGCAAACTGAACCCGCAAAGCCTACTGCCACCTC
CACTGAAGTGCAAACGGATCCATGGATGCCGATGCCTATTACAACTGACGCCGCCGGTCCCACTCGAAGATCCCGAC
GAAAGTACGGTCCAGCAAGTCTGTTGATGCCCAACTATGTTGTACACCCATCTATTATTCCTACTCCTGGTTACCGA
GGCACTCGCTACTATCGCAGCCGAAACAGTACCTCCCGCCGTCGCCGCAAGACACCTGCAAATCGCAGTCGTCGCCG
TAGACGCACAAGCAAACCGACTCCCGGCGCCCTGGTGCGGCAAGTGTACCGCAATAGTAGTGCGGAACCTTTGACAC
TGCCGCGTGCGCGTTACCATCCAAGTATCATCACTTAATCAATGTTGCCGCTGCCTCCTTGCAGATATGGCCCTCAC
TTGTCGCCTTCGCGTTCCCATCACTGGTTACCGAGGAAGAAATTCGCGCCGTAGAAGAGGGATGTTGGGGCGCGGAA
TGCGACGCTACAGGCGACGGCGTGCTATCCGCAAGCAATTGCGGGGTGGTTTTTTGCCAGCCTTAATTCCAATTATC
GCTGCTGCAATTGGCGCGATACCAGGCATAGCTTCCGTGGCGGTTCAGGCCTCGCAACGACATTGACATTGGAAAAA
AAAGTATAAATAAAAAAAAAAATACAATGGACTCTGACACTCCTGGTCCTGTGACTATGTTTTCTTAGAGATGGAAA
ACATCAATTTTTCATCCTTGGCTCCGCGACACGGCACGAAGCCGTACATGGGCACCTGGAGCGACATCGGCACGAGC
CAACTGAACGGGGGCGCCTTCAATTGGAGCAGTATCTGGAGCGGGCTTAAAAATTTTGGCTCAACCATAAAAACATA
CGGGAACAAAGCTTGGAACAGCAGTACAGGACAGGCGCTTAGAAATAAACTTAAAGACCAGAACTTTCAACAAAAAG
TAGTCGATGGGATAGCTTCCGGCATCAATGGAGTGGTAGATTTGGCTAATCAGGCTGTGCAGAAAAAGATAAACAGT
CGTTTGGACCCGCCGCCAGCAACCCCAGGTGAAATACAAGTGGAGGAAGAAATTCCTCCGCCAGAAAAACGAGGCGA
CAAGCGTCCGCGTCCCGATTTGGAAGAGACGCTGGTGACGCGCGTAGATGAACCGCCTTCTTATGAGGAAGCAACGA
AGCTTGGAATGCCCACCACTAGACCGATAGCCCCTATGGCTACCGGGGTAATGAAACCTTCTCAGTTGCATCGACCC
GTCACTTTGGATTTGCCCCCTCCCCCTGCTGCTACTGCTGTACCCGCTTCTAAGCCTGTCGCTGCCCCGAAACCAGT
CGCCGTAGCCAGGTCACGTCCCGGGGGCGCTCCTCGTCCAAATGCGCACTGGCAAAATACTCTGAACAGCATCGTGG
GTCTAGGCGTGCAAAGTGTAAAACGCCGTCGCTGCTTTTAATTAAATATGGAGTAGCGCTTAACTTGCCTATCTGTG
TATATGTGTCATTACACGCCGTCACAGCAGCAGAGGAAAAAAGGAAGAGGTCGTGCGTCGACGCTGAGTTACTTTCA
AGATGGCCACCCCATCGATGCTGCCCCAGTGGGCATACATGCACATCGCCGGACAGGATGCTTCGGAGTACCTGAGT
CCGGGTCTGGTGCAGTTCGCCCGCGCCACAGACACCTACTTCAATCTGGGAAATAAGTTTAGAAATCCCACCGTAGC
GCCAACCCACGATGTGACCACCGACCGTAGCCAGCGGCTCATGTTGCGCTTCGTGCCCGTTGACCGGGAGGACAATA
CATACTCTTACAAAGTGCGGTACACCCTGGCCGTGGGCGACAACAGAGTGCTGGATATGGCCAGCACGTTCTTTGAC
ATTAGGGGCGTGTTGGACAGAGGTCCCAGTTTCAAACCCTATTCTGGTACGGCTTACAACTCTCTGGCTCCTAAAGG
CGCTCCAAATGCATCTCAGTGGTTGGATAAAGGGGTTGAAACTACTGAAGAACGGCAAAATGAAGACGGGGAAAATG
ACGAAAAAGCTACATACACTTTTGGCAATGCCCCAGTAAAAGCCGATGCTGACATTACAAAAGACGGACTACCAATA
GGTTTGGAAGTCCCAGCTGAAGGTGACCCTAAACCTATCTACGCTAATAAGCTTTACCAACCAGAACCCCAGGTGGG
ACAGGAATCGTGGACTGATACAGATGGCACTGAAGAAAAATACGGAGGCAGAGTACTTAAACCGGACACTAAAATGA
AACCGTGCTATGGGTCTTTTGCTAAACCTACTAATGTGAAAGGCGGACAGGCAAAAGTGAAAACAGAAGAAGGCAAC
AACATTGAATATGACATTGACATGAACTTTTTTGACTTAAGATCACAAAAACAAGGTCTTAAACCTAAGATTGTAAT
GTATGCAGAAAATGTGGACCTGGAATCTCCAGATACTCATGTTGTGTACAAACCTGAAGTTTCAGATGCTAGTTCAA
ATGCTAATCTTGGACAGCAGTCTATGCCCAACAGACCCAACTACATTGGCTTCAGAGATAATTTTATTGGTCTTATG
TACTATAACAGTACTGGTAACATGGGGGTGCTGGCTGGCCAAGCATCTCAGTTGAATGCAGTGGTTGACTTGCAGGA
CAGAAACACAGAACTGTCTTACCAACTCTTGCTTGACTCCCTGGGCGATAGAACCAGATACTTTAGCATGTGGAATC
AGGCTGTTGACAGTTATGATCCCGATGTGCGTGTTATTGAAAATCATGGTGTGGAAGATGAACTTCCCAACTACTGT
TTTCCACTGGACGGCATCGGTCCGCGAACAGATAGTTACAAGGAGATTCAGTTAAATGGAGACCAAGCTTGGAAAGA
TGTAAATCCAAATGGTATCAGTGAACTTGTTAAGGGAAATCCATTTGCCATGGAAATTAACCTTCAAGCCAATCTAT
GGCGAAGTTTCCTTTATTCCAATGTGGCTCTGTATCTCCCAGACTCGTACAAATACACCCCGTCCAATGTCACTCTT
CCAGAAAACAAAAACACCTACGACTACATGAACGGGCGGGTGGTGCCGCCATCTCTAGTAGACACCTATGTGAACAT
TGGCGCCAGGTGGTCTCTGGATGCTATGGACAATGTCAACCCATTCAACCACCACCGTAACGCTGGCTTGCGTTACC
GATCCATGCTTTTGGGTAACGGACGTTATGTGCCTTTCCACATACAAGTGCCTCAAAAATTCTTCGCTGTCAAAAAC
CTGCTGCTTCTCCCAGGCTCCTACACTTATGAGTGGAACTTCAGGAAGGATGTGAACATGGTGCTACAGAGTTCCCT
CGGTAACGACCTACGGGTAGATGGCGCCAGCATCAGTTTCACGAGCATCAACCTCTATGCTACCTTTTTCCCCATGG
CTCACAACACCGCTTCCACCCTTGAAGCCATGCTGCGGAATGACACCAATGATCAGTCATTCAACGACTATCTATCT
GCAGCTAACATGCTCTATCCCATTCCTGCCAATGCAACCAATATTCCCATTTCCATTCCTTCTCGCAACTGGGCGGC
TTTCAGAGGCTGGTCATTTACCAGACTCAAAACCAAAGAAACTCCCTCTTTGGGGTCTGGATTTGACCCCTACTTTG
TCTATTCTGGTTCTATTCCCTACCTGGATGGTACCTTCTACCTGAACCACACTTTTAAGAAGGTTTCCATCATGTTT
GACTCTTCAGTGAGCTGGCCTGGAAATGACAGGTTACTATCTCCCAACGAATTTGAAATAAAGCGCACTGTGGATGG
CGAAGGCTACAATGTAGCCCAATGCAACATGACCAAAGACTGGTTCTTGGTACAGATGCTCGCCAACTACAACATAG
GCTATCAGGGCTTCTACATTCCAGAAGGATACAAAGATCGCATGTATTCATTTTTCAGAAACTTCCAGCCCATGAGC
AGGCAGGTGGTTGATGAGGTCAATTACAAAGACTTCAAGGCCGTCGCCATACCCTACCAACACAACAACTCTGGCTT
TGTGGGTTACATGGCTCCGACCATGCGCCAAGGTCAACCCTATCCCGCTAACTATCCCTATCCACTCATTGGAACAA
CTGCCGTAAATAGTGTTACGCAGAAAAAGTTCTTGTGTGACAGAACCATGTGGCGCATACCGTTCTCGAGCAACTTC
ATGTCTATGGGGGCCCTTACAGACTTGGGACAGAACATGCTTTATGCCAACTCAGCTCATGCTCTGGACATGACCTT
TGAGGTGGATCCCATGGATGAGCCCACCCTGCTTTATCTTCTCTTCGAAGTTTTCGACGTGGTCAGAGTGCATCAGC
CACATCGCGGCATCATCGAGACAGTCTACCTGCGTACACCGTTCTCGGCCGGTAACGCTACCACGTAAAAAGCTTCT
TGCTTCTTGCAAACAGCAGCTGCAACCATGGCCTGCGGATCCCAAAACGGCTCCAGCGAGCAAGAGCTCAGAGCCAT
TGTCCAAGACCTGGGTTGCGGACCCTATTTTTTGGGAACCTACGATAAGCGCTTCCCGGGGTTCATGGCCCCCGATA
AGCTCGCCTGTGCCATTGTAAACACGGCCGGACGTGAGACGGGGGGAGAGCACTGGTTGGCTTTCGGTTGGAACCCA
CGTTCTAACACCTGCTACCTTTTTGATCCTTTTGGATTCTCGGATGATCGTCTTAAACAGATTTACCAGTTTGAATA
TGAGGGTCTCCTGCGCCGCAGCGCTCTTGCTACCAAGGACCGCTGTATTACGCTGGAAAAATCTACCCAGACCGTGC
AGGGCCCCCGTTCTGCCGCCTGCGGACTTTTCTGCTGCATGTTCCTTCATGCCTTTGTGCACTGGCCTGACCGTCCC
ATGGACGGAAACCCCACCATGAAATTGCTGACTGGAGTGCCAAACAACATGCTTCATTCTCCTAAAGTCCAGCCCAC
CCTGTGTGACAATCAAAAAGCACTCTACCATTTTCTCAATACCCATTCGCCTTATTTTCGCTCCCATCGTACACACA
TCGAAAGGGCCACTGCGTTCGACCGTATGGATGTGCAATAATGACTCATGTAAACAACGTGTTGAATAAACAGCACT
TTATTTTTTACACGTATCAAGGCTCTGGATTACTTATTTATTTACAAGTCGAATGGGTTCTGACGAGAATCAGAATG
ACCCGCGGGCAGTGATACGTTGCGGAACTGATACTTGGGTTGCCACTTGAATTCGGGAATCACCAACTTGGGAACCG
GTATATCGGGTAGGATGTCACTCCACAGCTTTCTGGTCAGCTGCAAAGCTCCCAGCAGGTCAGGAGCCGAAATCTTG
AAATCACAATTAGGACCAGTGCTCTGAGCGCGAGAGTTGCGGTACACCGGATTGCAGCACTGAAACACCATCAGCGA
CGGATGTCTCACGCTTGCCAGCACGGTGGGATCTGCAATCATGCCCACATCCAGATCTTCAGCATTGGCAATGCTGA
ACGGGGTCATCTTGCAGGTCTGCCTACCCATGGCGGGCACCCAATTAGGCTTGTGGTTGCAATCGCAGTGCAGGGGG
ATTAGTATCATCTTGGCCTGATCCTGTCTGATTCCTGGATACACGGCTCTCATGAAAGCATCATATTGCTTGAAAGC
CTGCTGGGCTTTACTACCCTCGGTATAGAACATCCCGCAGGACCTGCTCGAAAACTGGTTAGCTGCGCAGCCGGCAT
CATTCACACAGCAGCGGGCGTCATTGTTGGCTATTTGCACCACACTTCTGCCCCAGCGGTTTTGGGTGATTTTGGTT
CGCTCGGGATTCTCCTTCAAGGCTCGTTGTCCATTCTCGCTGGCCACATCCATCTCGATAATCTGCTCCTTCTGAAT
CATAATAGTGCCATGCAGGCACTTCAGCTTGCCCTCATAATCATTGCAGCCATGAGGCCACAACGCACAGCCTGTAC
ATTCCCAATTATGGTGGGCGATCTGAGAAAAAGAATGTATCATTCCCTGCAGAAATCTTCCCATCATCGTGCTCAGT
GTCTTGTGACTAGTGAAAGTTAACTGGATGCCTCGGTGCTCCTCGTTTACGTACTGGTGACAGATGCGCTTGTATTG
TTCGTGCTGCTCAGGCATTAGTTTAAAAGAGGTTCTAAGTTCGTTATCCAGCCTGTACTTCTCCATCAGTACACACA
TCACTTCCATGCCCTTCTCCCAAGCAGACACCAGGGGCAAGCTAATCGGATTCTTAACAGTACAGGCAGCAGCTCCT
TTAGCCAGAGGATCATCTTTGGCAATCTTTTCAATGCTTCTTTTGCCATCCTTCTCAACGATGCGCACGGGCGGGTA
GCTGAAACCTACTGCTACAAGCTGCGCCTCTTCTCTTTCTTCTTCGCTGTCTTGACTGATGTCTTGCATGGGAACAT
GTTTGGTCTTCCTTGGCTTCTTTTTGGGGGGTATCGGGGGAGGAGGACTGTCGCTCCGTTCCGGAGACAGGGAGGAT
TGTGAAGTTTCGCTCACCATTACCAACTGACTGTCGGTAGAAGAACCTGACCCCACACGGCGACAGGTGTTTCTCTT
CGGGGGCAGAGGTGGAGGCGATTGCGAAGGGCTGCGGTCCGACCTGGAAGGCGGATGACTGGCAGAACCCCTTCCGC
GTTCGGGGGTGTGCTCCCTGTGGCGGTCGCTTAACTGATTTCCTTCGCGGCTGGCCATTGTGTTCTCCTAGGCAGAG
AAACAACAGACATGGAAACTCAGCCATTGCTGTCAACATCGCCACAAGTGCCATCACATCTCGTCGTCAGCGACGAG
GAAAAGGAGCAGAGCTTAACCATTCCACCGCCCAGTCCTGCCACCACCTCTACCCTAGAAGATAAGGAGGTCGACGC
ATCTCATGACATGCAGAATAAAAAAGCGAAAGAGTCTGAAACAGACATCGAGCAAGACCCGGGCTATGTGACACCGG
TGGAACACGAGGAAGAGTTGAAACGCTTTCTAGAGAGAGAGGATGAAAACTGCCCAAAACAGCAAGCGGATAACTAT
CACCAAGATGCTGGAAATAGGGATCAGAACACCGACTACCTCATAGGGCTTGACGGGGAAGACGCGCTCCTTAAACA
TCTAGCAAGACAGTCACTCATAGTCAAGGATGCATTATTGGACAGAACTGAAGTGCCCATCAGTGTGGAAGAGCTCA
GCCGCGCCTACGAGCTTAACCTTTTTTCACCTCGTACTCCCCCCAAACGCCAGCCAAACGGCACCTGCGAGCCAAAT
CCTCGCTTAAACTTTTATCCAGCTTTTGCTGTGCCAGAAGTACTCGCTACTTATCACATCTTTTTTAAAAATCAAAA
AATTCCAGTCTCCTGCCGCGCTAATCGCACCCGCGCTGACGCCCTACTTAATCTGGGACCTGGTTCACGCTTACCTG
ATATAGCTTCCTTGGAAGAGGTTCCAAAAATCTTCGAGGGTCTGGGCAATAATGAGACTCGGGCCGCAAATGCTCTG
CAAAAGGGAGAAAATGGCATGGATGAGCATCACAGCGTTCTGGTGGAATTGGAGGGCGATAATGCCAGACTCGCAGT
ACTCAAGCGAAGCGTCGAGGTCACACACTTTGCATACCCCGCTGTCAACCTGCCCCCTAAAGTTATGACGGCGGTCA
TGGACCAGTTACTCATTAAGCGCGCAAGTCCCCTTTCAGAAGACATGCATGACCCAGACGCCTGTGATGAGGGTAAA
CCAGTGGTCAGTGATGAGCAGCTAACCCGATGGCTGGACACCGACTCTCCCCGGGATTTGGAAGAGCGTCGCAAGCT
TATGATGGCCGTAGTGCTGGTTACCGTAGAACTAGAGTGTCTCCGGCGTTTCTTTACCGATTCAGAAACCTTGCGCA
AACTCGAAGAGAATCTGCACTACACTTTTAGACACGGCTTTGTGCGGCAGGCGTGCAAGATATCTAACGTGGAACTC
ACCAACCTGGTTTCCTACATGGGTATTCTGCATGAGAATCGTCTAGGACAAAGCGTGCTGCACAGCACCCTTAAGGG
GGAAGCCCGCCGTGATTACATCCGCGATTGTGTCTATCTCTACCTGTGCCACACGTGGCAAACCGGCATGGGTGTAT
GGCAGCAATGTTTAGAAGAACAGAACTTGAAAGAGCTTAACAAGCTCTTACAGAAATCTCTTAAGGTTCTGTGGACA
GGGTTCGACGAGCGCACCGTCGCTTCCGACCTGGCAGACCTCATCTTCCCAGAGCGTCTTAGGGTTACTTTGCGAAA
CGGACTGCCTGACTTTATGAGCCAGAGCATGCTTAACAATTTTCGCTCTTTCATCCTGGAACGCTCCGGTATCCTGC
CCGCCACCTGCTGCGCACTGCCCTCCGACTTTGTGCCTCTCACCTACCGCGAGTGCCCCCCGCCGCTATGGAGTCAC
TGCTACCTGTTCCGTCTGGCCAACTACCTCTCCTACCACTCGGATGTGATCGAGGATGTGAGCGGAGACGGCTTGCT
GGAGTGTCACTGCCGCTGCAATCTGTGCACGCCCCACCGGTCCCTAGCTTGCAACCCCCAGTTGATGAGCGAAACCC
AGATAATAGGCACCTTTGAACTGCAAGGCCCCAGCAGCCAAGGCGATGGGTCTTCTCCTGGGCAAAGTTTAAAACTG
ACCCCGGGACTGTGGACCTCTGCCTACTTGCGCAAGTTTGCCCCGGAAGATTACCACCCCTATGAAATCAAGTTCTA
TGAGGACCAATCACAGCCTCCAAAGGCCGAACTTTCGGCCTGCGTCATCACCCAGGGGGCAATTCTAGCCCAATTGC
AAGCCATCCAAAAATCCCGCCAAGAATTTCTACTGAAAAAGGGTAAGGGGGTCTACCTTGACCCCCAGACCGGCGAG
GAACTCAACACAAGGTTCCCTCAGGATGTCCCAACGACGAGAAAGCAAGAAGTTGAAGGTGCAGCCGCCGCCCCCAG
AAGATATGGAGGAAGATTGGGACAGTCAGGCAGAGGAAGCGGAGGAGGACAGTCTGGAGGACAGTCTGGAGGAAGAC
AGTTTGGAGGAGGAAAACGAGGAGGCAGAGGAGGTGGAAGAAGTAACCGCCGACAAACAGTTATCCCCGGCTGCGGA
GACAAGCAACAGCGCTATCATCTCCGCTCCGAGTCGAGGAACGCGGCGGCGTCCCAGCAGTAGATGGGACGAGACCG
GACGCTTCCCGAACCCAACCACCGCTTCCAAGACCGGTAAGAAGGATCGGCAGGGATACAAGTCCTGGCGGGGGCAT
AAGAATGCCATCATCTCCTGCTTGCATGAGTGCGGGGGAAACATATCCTTCACGCGACGCTACTTGCTATTCCACCA
TGGGGTGAACTTTCCACGCAATGTTTTGCATTACTACCGTCACCTCCACAGCCCCTACTATAGCCAGCAAATCCCGG
CAATCTCGACAGAAAAAGACAGCGGCGGCGACCTCCAACAGAAAACCAGCAGCGGCAGTTAAAAAATACACAACAAG
TGCAGCAACAGGAGGATTAAAGATTACAGCCAACGAGCCAGCGCAAACCCGAGAGCTAAGAAATCGGATCTTTCCAA
CCCTGTATGCCATCTTCCAGCAGAGTCGGGGCCAAGAGCAGGAACTGAAAATAAAAAACCGATCTTTGCGTTCGCTC
ACCAGAAGTTGTTTGTATCACAAGAGCGAAGATCAACTTCAGCGCACTCTTGAGGACGCCGAGGCTCTCTTCAACAA
GTACTGCGCGCTGACTCTTAAAGAGTAGGCAGCGACCGCGCTTATTCAAAAAAGGCGGGAATTACATCATCCTCGTC
ATGAGTAAAGAAATTCCCACGCCTTACATGTGGAGTTATCAGCCCCAAATGGGATTGGCGGCAGGCGCCTCCCAGGA
CTACTCCACCCGCATGAATTGGCTCAGCGCCGGGCCTTCTATGATTTCTCGAGTTAATGATATACGCGCCTACCGAA
ACCAAATACTTTTGGAACAGTCAGCTCTTACCACCACGCCCCGCCAACACCTTAATCCCAGAAATTGGCCCGCCGCC
CTAGTATACCAGGAAAGTCCCGCTCCCACCACTGTATTACTTCCTCGAGACGCCCAGGCCGAAGTCCAAATGACTAA
TGCAGGTGCGCAGTTAGCTGGCGGCTCCACCCTATGTCGTCACAGGCCTCGGCATAATATAAAACGCCTGATGATTA
GAGGCCGAGGTATTCAGCTTAACGACGAGTCGGTGAGCTCTCCGCTTGGTCTACGACCAGACGGAATCTTTCAAATT
GCCGGCTGCGGGAGATCTTCCTTCACCCCTCGTCAGACTGTTTTGACTTTGGAAAGTTCGTCTTCGCAACCCCGCTC
GGGCGGAATCGGGACCGTTCAATTTGTGGAGGAGTTTACTCCCTCTGTCTACTTCAACCCTTTCTCCGGATCTCCTG
GGCACTACCCGGACGAGTTCATACCGAACTTTGACGCAATTAGCGAGTCAGTGGACGGCTACGATTGATGTCTGGTG
ACGCGGCTGAGCTATCTCGGCTGCGACATCTAGACCACTGCCGCCGCTTTCGCTGTTTTGCCCGGGAACTCATTGAG
TTCATTTACTTCGAACTCCCCAAGGATCACCCTCAAGGTCCGGCCCACGGAGTGCGGATTACTATCGAAGGTAAAAT
AAACTCTCGCCTGCATCGAATTTTCTCCCAGCGGCCCGTGCTGATCGAGCGAGACCAGGGAAACACCACGGTTTCTA
TCTACTGCATTTGTAATCACCCAGGATTGCATGAAAGCCTTTGCTGTCTTATGTGTACTGAGTTTAATAAAAACTGA
ATTAAGACTCTCCTACGGACTGCCGCTTCTTCAACCCGGATTTTACAACCAGAAGAACGAAACTTTTCCTCTCATCC
AGGACTCTGTTAACTTTACCTTTCCTACTTACAAACCAGAAGCTCAACGACAACACCGCTTTTCCAGAAGCATTTTC
CCTACTAATACTACTTTCAAAACCGGAGGTGAGCTCCACAGTCTCCCCGCAGAAAACCCTTGGGTGGAAGCGGGCCT
TGTAGTGCTAGGAATTCTTGCGGGCGGGCTTGTGATTATTCTTTGCTACCTATACACACCTTGCTTCACTTTCCTAG
TGGTGTTGTGGTATTGGTTTAAAAAATGGGGCCCATACTAGTCTTGCTTGTTTTACTTTCGCTTTTGGGACCGGGTT
CTGCCAACTACAATCCATGTCTAGACTTTGACCCAGAAAACTGCACACTTACTTTTGCACCCGACACAAGCCGCATC
TGTGGAGTTCTTATTAAGTGCGGATGGGAATGCAGGTCCGTTGAAATTACACACAATAACAAAACCTGGAACAATAC
CTTATCCACCACATGGGAGCCAGGAGTTCCCGAGTGGTACACTGTCTCTGTCCGAGGTCCTGACGGTTCCATCCGCA
TTAGTAACAACACTTTTATTTTTTCTACAATGTGCGATCTGGCCATGTTCATGAGCAAACAGTATTCTCTATGGCCT
CCCAGCAAGGACAACATTGTAACGTTCTCCATTGCTTATTGCTTGTGCGCTTGCCTTCTTACTGCTTTACTGTGCGT
ATGCATACACCTGCTTGTAACCACTCGTATCAAAAACGCCAATAACAAAGAAAAAATGCCTTAACCTCTTTCTGTTT
ACAGACATGGCTTTTCTTACAGCTCTCATACTTGTCAGCATTGTCACTGCCGCTCACGGACAAACAGTCGTCTCTAT
CCCTCTAGGTCATAATTACACTCTCATAGGACCCCCAATCACTTCAGAGGTCATCTGGACCAAACTGGGAAGCGTTG
ATTACTTTGATATAATCTGTAACAAAACAAAACCAATAATAGTAACCTGCAACATACAAAATCTTACATTAATTAAT
GTTAGCAAAGTTTACAGCGGTTACTATTATGGTTATGACAGATACAGTAGTCAATATAGAAATTACTTGGTTCGTGT
TACCCAGTCCAAAACCACGAAAATGCCAAATATGGCAGAAATTCGATCCGATGACAATTCTCTAGAAACTTTTACAT
CTTCCACCACACCTGACGAAAAAAATATCCCAGATTCAATGATTGCAATTATCGCAGCGGTGGCAGTGGTGATGGCA
CTAACAGTAATATGCATGCTTTTATATGCTTGTCGCTACAAAAAGTTTCATCCTAAAAAACAAGATCTCCTACTAAG
GCTTAACATTTAATTTCTTTTTACACAGCCATGGTTTCCACTACCACATTCCTTATGCTTACTAGTATAGCAACTCT
GACTTCTGCTCGCTCACACCTCACTGTAACTATAGGCTCAAACTGCACACTAAAAGGACCTCAAGGTGGTCATGTCT
TTTGGTGGAGAATATATGACAATGGATGGTTTACAAAACCATGTGACCAACCTGGTAGATTTTTCTGCAACGGCAGA
GACCTAACCATTATCAACGTGACAGCAAATGACAAAGGCTTCTATTATGGAACCGACTATAAAAGTAGTTTAGATTA
TAACATTATTGTACTGCCATCCACCACTCCAGCGCCCCGCAAAACTACTTTCTCTAGCAGCAGTGCCGCTAACAATA
CAATTTCCAATCCAACCTTTACCGCGCTTTTAAAACGCACTGTGAATAATTCTACAACAATTTCCACTTCAACAATC
AGCATCATCGCTGCCGTGACAATTGGAATATCTATTCTTGTTTTTACCATAACCTACTACACCTGCTGCTATAAAAA
AGACGAACATAAAGGTGATCCATTACTTAGATTTGATATTTAATTTGTTCTTTTTTTTTTTATTTACAGTATGGTGA
ACACCAATCATGGTACCTAGAAATTTCTTCTTCACCATACTCATCTGTGCTTTTAATGTTTGCGCTACTTTCACAGC
AGTAGCCACAGCAAGCCCAGACTGTATAGGAGCATTTGCTTCCTATGCACTTTTTGCTTTTGTCACTTGCATCTGCG
TATGTAGCATAGTCTGCCTGGTTATTAATTTTTTCCAACTTCTAGACTGGATCCTTGTGCGAATTGCCTACCTGCGC
CACCATCCCGAATACCGCAACCAAAATATCGCGGCACTTCTTAGACTTATCTAAAACCATGCAGGCTATACTACCAA
TATTTTTGCTTCTATTGCTTCCCTACGCTGTCTCAACCCCAGCTACCTATAGTACTCCACCAGAACACCTTAGAAAA
TGCAAATTCCAACAACCGTGGTCATTTCTTGCTTGCTATCGAGAAAAATCTGAAATTCCCCCAACTTTAATAATGAT
TGCTGGAATAATTAATGTAATCTGTTGCACCATAATTTCATTTCTGATATACCCCCTATTTGATTTTGGCTGGAATG
CTCCCAATGCACATGATTATTCCCAAGACCCAGAGGAACACATTCCCCTACATAACATGCAACAACCAATAGCGCTA
ATAGAATACGAAAGTGAACCACAACCCCCACTACTCCCTGCTATTAGTTACTTCAACCTAACCGGCGGAGATGACTG
AAACACTCACCACCTCCAATTCCGCCGAGGATCTGCTTGATATGGACGGCCGCGTCTCAGAACAGCGACTCGCCCAA
CTACGCATCCGCCAGCAGCAGGAACGCGTGGCCAAAGAGCTCAGAGATGTCATCCAAATTCACCAATGCAAAAAAGG
CATATTCTGTTTGGTAAAACAAGCCAAAATATCCTACGAGATCACCGCTACCGACCATCGCCTCTCTTACGAGCTTG
GCCCCCAACGACAAAAATTTACCTGCATGGTGGGAATCAACCCCATAGTTATCACCCAACAAAGTGGAGATACTAAG
GGTTGCATTCACTGCTCCTGCGATTCCATCGAGTGCACCTACACCCTGCTGAAGACCCTATGCGGACTAAGAGACCT
GCTACCCATGAATTAAAAAAATGATTAATAAAAAATCACTTACTTAAAATCAGCAATAAGGTCTCTATTGAAATTTT
CTCCCAGCAGCACCTCACTTCCCTCTTCCCAACTCTGGTATTCTAAACCCCGTTCAGCGGCATACTTTCTCCATACT
TTAAAGGGGATGTCAAATTTTAGCTCCTCTCCTGTACCCACAATCTTCATCTCTTTCTTCCCAGATGACCAAGAGAG
TCCGGCTCAGTGACTCCTTCAACCCTGTCTACCCCTATGAAGATGAAAGCACCTCCCAACACCCCTTTATAAACCCA
GGGTTTATTTCCCCAAATGGCTTCACCCAAAGCCCAGACGGAGTTCTTACTTTAAAATGTTTAACCCCGCTAACAAC
CACAGGCGGGTCTCTACAGCTAAAAGTGGGAGGGGGACTTACAGTAGATGACACTGATGGGACCTTACAAGAAAACA
TAGGTGCCACCACACCACTTGTTAAGACTGGGCACTCTATAGGTTTATCCCTAGGAGCCGGATTGGGAACAGATGAA
AATAAACTTTGTACCAAATTGGGAGAAGGACTTACATTCAATTCAAACAACATTTGCATTGATGACAATATTAACAC
CCTGTGGACAGGAGTTAACCCCACCGAAGCCAACTGTCAAATGATGGACTCCAGTGAATCTAATGATTGCAAATTAA
TTCTAACACTAGTTAAAACTGGAGCCCTAGTCACTGCATTTGTTTATGTTATAGGAGTATCTAACAATTTTAATATG
CTAACTACATACAGAAATATAAATTTTACTGCGGAGCTGTTTTTTGATTCTGCGGGTAATTTACTAACTAGCCTGTC
ATCCCTAAAAACTCCACTTAATCATAAATCAGGACAAAACATGGCTACTGGTGCCATTACTAATGCTAAAAGTTTCA
TGCCCAGCACAACTGCTTATCCTTTCAATAATAATTCTAGAGAAAAAGAAAACTACATTTACGGAACTTGTCACTAC
ACAGCTAGTGATCACACTGCTTTTCCCATTGACATATCTGTCATGCTTAACCAAAGAGCAATAAGAGCTGATACATC
ATATTGTATTCGTATAACTTGGTCCTGGAACACAGGAGATGCCCCAGAGGGGCAAACCTCTGCTACAACCCTAGTTA
CCTCCCCATTTACCTTTTACTACATCAGAGAAGACGACTGACAAATAAAGTTTAACTTGTTTATTTGAAAATCAATT
CACAAACTCCGAGTAGTTATTTTGCCTCCCCCTTCCCATTTAACAGAATATACCAATCTCTCCCCACGCACAGCTTT
AAACATTTGGATACCATTAGAGATAGACATGGTTTTAGATTCCACATTCCAAACAGTTTCAGAGCGAGCCAATCTGG
GGTCAGTGATAGATAAAAATCCATCGGGATAGTCTTTTAAAGCGCTTTCACAGTCCAACTGATGCGGATGCGACTCC
GGAGTCTGGATCACGGTCATCTGGAAGAAGAACGATGGGAATCATAATCCGAAAACGGGATCGGGCGATTGTGTCTC
ATCAAACCCACAAGCAGCCGCTGTCTGCGTCGCTCCGTGCGACTGCTGTTTATGGGATCGGGATCCACAGTGTCCTG
AAGCATGATTTTAATAGCCCTTAACATTAACTTTCTGGTGCGATGCGCGCAGCAACGCATTCTTATTTCACTTAGAT
TAATACAGTAGGTACAGCACATTATCACAATATTGTTTAATAAACCATAATTAAAAGCACTCCAGCCAAAACTCATA
TCTGATATAATCGCCCCTGCATGACCATCATACCAAAGTTTAATATAAATTAAATGACGTTCCCTCAAAAACACACT
ACCCACATACATGATCTCTTTTGGCATGTGCATATTAACAATCTGTCTGTACCATGGACAACGTTGGTTAATCATGC
AGCCCAATATAACCTTCCGGAACCACACTGCCAACACCGCTCCCCCAGCCATGCATTGAAGTGAACCCTGCTGATTA
CAATGACAATGAAGAATCCAATTCTCTCGACCGTGAATCACTTGAGAATGAAAAATATCTATAGTAGCACAACATAG
ACATAAATGCATGCATCTTCTCATAATTTTTAACTCCTCAGGATTTAGAAACATATCCCAAGGAATAGGAAGCTCTT
GCAGAACAGTAAAGCTGGCAGAACAAGGAAGACCACGAACACAACTTACACTATGCATAGTCATAGTATCACAATCT
GGCAACAGCGGGTGGTCTTCAGTCATAGAAGCTCGGGTTTCATTTTCCTCACAACGTGGTAACTGGGCTCTGGTGTA
AGGATGATGTCTGGCGCATGATGTCGAGCGTGCGCACAACCTTGTCATAATGGAGTTGCTTCCTGACATTCTCGTAT
TTTGTATAGCAAAACGCGGCCCTGGCAGAACACACTCTTCTTCGCCTTTTATCCTGCCGCTTAGCGTGTTCCGTGTG
ATAGTTCAAGTACAGCCACACTCTTAAGTTGGTCAAAAGAATGCTGGCTTCAGTTGTAATCAAAACTCCATCACATC
TAATCGTTCTGAGGAAATGATCCACGGTAGCATATGCAAATCCCAACCAAGCAATGCAACTGGATTGCGTTTCAAGC
AGGAGAGGAGAGGGAAGAGACGGAAGAACCATGTTAATTTTTATTCCAAACGATCTCGCAGTACTTCAAATTGTAGA
TCGCGCAGATGGCATCTGTCGCCCCCACTGTGTTGGTGAAAAAGCACAGCTAGATCAAAAGAAATGCGATTTTCAAG
GTGCTCAACGGTGGCTTCCAGCAAAGCCTCCACGCGCACATCCAAGAACAAAAGAATACCAAAAGAAGGAGCATTTT
CTAACTCCTCAATCATCATATTACAGTCCTGCACCATTCCCAGATAATTTTCAGCTTTCCAGCCTTGGATTATTCGT
GTCATTTCTTGTGGTAAATCCAATCCACACATTACAAACAGGTCCCGGAGGGCGCCCTCCACCACCATTCTTAAACA
CACCCTCATAATGACAAAATATCTTGCTCCTGTGTCACCTGTAGCAAATTGAGAATGGCAACATCAATTGACATGCC
GTTGGCTCTAAGTTCTTCTCTAAGTTCTAGTTGTAAATACTCTTTCATATTATCACCAAACTGCTTAGCCAGAAGCC
CCCCGGGAACAAGAGCAGGACACGCTACAGTGCAGTACAAGCGCAGACCTCCCCAATTGGCTCCAGCAAAAACAAGA
TTGGAATAAGCATATTGGGAACCACCAGTAATGTCATCAAAGTTGCTGGAAATATAATCAGGCAGAGTTTGTTGTAA
AAATTGAATAAAAGAAAAATTTGCCAAAAAAACATTCAAAACCTCTGGGATGCAAATGCAATAAGTTACCGCGCTGC
GCTCCAACATTGTTAGTTTTGAATGAGTCTGCAAAAAATAAAAAAACAAGCGTCATATCAGAGTAGCCTGACGAACA
GGTGGATAAATCAGTCTTTCCATCACAAGACAAGCCACAGGGTCTCCAGCCCGACCCTCGTAAAACCTGTCATCGTG
ATTAAACAACAGCACCGAAAGTTCCTCGCGGTGACCAGCATGAATAATTCTTGATGAAGCATACAATCCAAACATGT
TAGCATCAGTTAAAGACAAAAAACAGCCAATATAGCCTCTGGGTATAATTATGCTTAATCGTAAATATAGCAAAGCC
ACCCCTCGCGGATACAAAGTAAAAGGCACAGGAGAATAAAAAATATAATTATTCCTTTGCTGCTGTTCAGGCAACGT
CGCCCCCGGTCCCTCTAAATACACATACAAAGCCTCATCAGCCATGGCTTACCAGACAAAGTACAGCAGGCACACAA
AGCACAAGCTCTAAAGTCACTCACCAACCTGTCCACAGTATATATACACAAACCCTAAACTGACGTAATGGGGCTAA
AGTACACAAAATCCCGCCAAACCCAACACACACCCCGAAACTGCGTCACCACAAAAGTACAGTTTCACTTCCGCAAT
CCCAACAAGCGGCACTTCCTCTTTCTCACGGGACGTCACATCCGCTTAACTTGCAACCTCATTTTCCCACGGCCGCG
CCGCCCCTTTTAGCCGTTAACCCCACAGCCAATTACCACACAGCCCACACTTTTTAAAATCACCTCATTTACATATT
GGCACCATTCCATCTATAAGGTATATTATTGATGATG

GenBank Accession No. AAW33140 (SEQ ID NO: 223)

MTKRVRLSDSFNPVYPYEDESTSQHPFINPGFISPNGFTQSPDGVLTLK
CLTPLTTTGGSLQLKVGGGLTVDDTDGTLQENIGATTPLVKTGHSIGLS
LGAGLGTDENKLCTKLGEGLTFNSNNICIDDNINTLWTGVNPTEANCQM
MDSSESNDCKLILTLVKTGALVTAFVYVIGVSNNFNMLTTYRNINFTAE
LFFDSAGNLLTSLSSLKTPLNHKSGQNMATGAITNAKSFMPSTTAYPFN
NNSREKENYIYGTCHYTASDHTAFPIDISVMLNQRAIRADTSYCIRITW
SWNTGDAPEGQTSATTLVTSPFTFYYIREDD

GenBank Accession No. AAW33119 (SEQ ID NO: 224)

MRRVVLGGAVVYPEGPPPSYESVMQQQQATAVMQSPLEAPFVPPRYLAP
TEGRNSIRYSELAPQYDTTRLYLVDNKSADIASLNYQNDHSNFLTTVVQ
NNDFTPTEASTQTINFDERSRWGGQLKTIMHTNMPNVNEYMFSNNFKAR
VMVSRKPPEGAAVGDTYDHKQDILEYEWFEFTLPEGNFSVTMTIDLMNN
AIIDNYLKVGRQNGVLESDIGVKFDTRNFKLGWDPETKLIMPGVYTYEA
FHPDIVLLPGCGVDFTESRLSNLLGIRKKQPFQEGFKILYEDLEGGNIP
ALLDVDAYENSKKEQKAKIEAAAEAKANIVASDFTRVANAGEVRGDNFA
PTPVPTAESLLADVTGGTDVKLTIQPVEKDSKNRSYNVLEDKINTAYRS
WYLSYNYGDPEKGVRSWTLLTTSDVTCGAEQVYWSLPDMMQDPVTFRST
RQVSNYPVVGAELMPVFSKSFYNEQAVYSQQLRQSTSLTHVFNRFPENQ
ILIRPPAPTITTVSENVPALTDHGTLPLRSSIRGVQRVTVTDARRRTCP
YVYKALGIVAPRVLSSRTF

GenBank Accession No. AAW33124 (SEQ ID NO: 225)

MATPSMLPQWAYMHIAGQDASEYLSPGLVQFARATDTYFNLGNKFRNPT
VAPTHDVTTDRSQRLMLRFVPVDREDNTYSYKVRYTLAVGDNRVLDMAS
TFFDIRGVLDRGPSFKPYSGTAYNSLAPKGAPNASQWLDKGVETTEERQ
NEDGENDEKATYTFGNAPVKADADITKDGLPIGLEVPAEGDPKPIYANK
LYQPEPQVGQESWTDTDGTEEKYGGRVLKPDTKMKPCYGSFAKPTNVKG
GQAKVKTEEGNNIEYDIDMNFFDLRSQKQGLKPKIVMYAENVDLESPDT
HVVYKPEVSDASSNANLGQQSMPNRPNYIGFRDNFIGLMYYNSTGNMGV
LAGQASQLNAVVDLQDRNTELSYQLLLDSLGDRTRYFSMWNQAVDSYDP
DVRVIENHGVEDELPNYCFPLDGIGPRIDSYKEIQLNGDQAWKDVNPNG
ISELVKGNPFAMEINLQANLWRSFLYSNVALYLPDSYKYTPSNVTLPEN
KNTYDYMNGRVVPPSLVDTYVNIGARWSLDAMDNVNPFNHHRNAGLRYR
SMLLGNGRYVPFHIQVPQKFFAVKNLLLLPGSYTYEWNFRKDVNMVLQS
SLGNDLRVDGASISFTSINLYATFFPMAHNTASTLEAMLRNDTNDQSFN
DYLSAANMLYPIPANATNIPISIPSRNWAAFRGWSFTRLKTKETPSLGS
GFDPYFVYSGSIPYLDGTFYLNHTFKKVSIMFDSSVSWPGNDRLLSPNE
FEIKRTVDGEGYNVAQCNMTKDWFLVQMLANYNIGYQGFYIPEGYKDRM
YSFFRNFQPMSRQVVDEVNYKDFKAVAIPYQHNNSGFVGYMAPTMRQGQ
PYPANYPYPLIGTTAVNSVTQKKFLCDRTMWRIPFSSNFMSMGALTDLG
QNMLYANSAHALDMTFEVDPMDEPTLLYLLFEVFDVVRVHQPHRGIIET
VYLRTPFSAGNATT

GenBank Accession No. AY601636 (SEQ ID NO: 203)

CATTATCTATAATATACCTTATAGATGGAATGGTGCCAACATGTAAATGAGGTAATTTAAAAAAGTGCGCGCTGTGT
GGTGATTGGCTGCGGGGTGAACGGCTAAAAGGGGCGGGCAATGCTGGGATGTGACGTAACTTATGTGGGAGGAGTTA
TGTTGCAAGTTATCGCGGTAAAGGTGACGTAAAACGAGGTGTGGTTTGGACACGGAAGTAGACAGTTTTCCCACGTT
TACTGACAGGATATGAGGTAGTTTTGGGCGGATGCAAGTGAAAATTCTCCATTTTCGCGCGAAAACTGAATGAGGAA
GTGAATTTCTGAGTCATTTCGCGGTTATGACAGGGTGGAGTATTTGCCGAGGGCCGAGTAGACTTTGACCGTTTACG
TGGAGGTTTCGATTACCGTGTTTTTCACCTAAATTTCCGCGTACGGTGTCAAAGTCCTGTGTTTTTACGTAGGTGTC
AGCTGATCACTAGGGTATTTAAACCTGTCGAGTTCCGTCAAGAGGCCACTCTTGAGTGCCAGCGAGAAGAGTTTTCT
CCTCCGCGCTGCGAGTCAGTTTTGCGCTTTGAAAATGAGACACCTGCGATTCCTGCCACAGGAGATTATCTCCAGCG
AGACCGGGATCGAAATACTGGAGTTTGTGGTAAATACCCTGATGGGAGATGACCCGGAACCGCCAGTGCAGCCTTTC
GATCCACCTACGCTGCACGATCTGTATGATTTAGAGGTAGACGGGCCTGATGATCCCAATGAGGAAGCTGTAAATGG
GTTTTTTACTGATTCTATGCTGCTAGCTGCCGATGAAGGATTGGACATAAACCCTCCTCCTGAGACCCTTGATACCC
CAGGGGTGGTTGTGGAAAGCGGCAGAGGTGGGAAAAAATTGCCTGATCTGGGAGCAGCTGAAATGGACTTGCGTTGT
TATGAAGAGGGTTTTCCTCCGAGTGATGATGAAGACGGGGAAACTGAACAGTCCATCCATACCGCAGTGAATGAGGG
AGTAAAAGCTGCCAGCGATGTTTTTAAGTTGGACTGTCCGGAGCTGCCTGGACATGGCTGTAAGTCTTGTGAATTTC
ACAGGAATAACACTGGAATGAAAGAACTATTGTGCTCGCTTTGCTATATGAGAATGCACTGCCACTTTATTTACAGT
AAGTGTATTTAAGTGAAATTTAAAGGAATAGTGTAGCTGTTTAATAACTGTTGAATGGTAGATTTATGTTTTTGCTT
GCGATTTTTTGTAGGTCCTGTGTCTGATGATGAGTCACCTTCTCCTGATTCAACTACCTCACCTCCTGAAATTCAGG
CGCCCGTACCTGCAAACGTATGCAAGCCCATTCCTGTGAAGCCTAAGTCTGGGAAACGCCCTGCTGTGGATAAGCTT
GAGGACTTGTTGGAGGGTGGGGATGGACCTTTGGACCTTAGTACCCGGAAACTGCCAAGGCAATGAGTGCCCTGCAG
CTGTGTTTATTTAGTGACGTCATGTAATAAAATTATGTCAGCTGCTGAGTGTTTTATTGCTTCTTGGGTGGGGACTT
GGATATATAAGTAGGAGCAGATCTGTGTGGTTAGCTCATAGCAACCTGCTGCCATCCATGGAGGTTTGGGCTATCTT
GGAAGACCTGAGACAGACTAGGCTACTGCTAGAAAACGCCTCGGACGGAGTCTCTGGCTTTTGGAGATTCTGGTTCG
GTGGCGATCTAGCTAGGCTAGTGTTTAGGATAAAACAGGACTATAGGGAAGAATTTGAAAAGTTATTGGACGACAGT
CCAGGACTTTTTGAAGCTCTTAACTTGGGCCATCAGGCTCATTTTAAGGAGAAGGTTTTATCAGTTTTAGATTTTTC
TACTCCTGGTAGAACTGCTGCTGCTGTAGCTTTTCTTACTTTTATATTGGATAAATGGATCCGCCAAACCCACTTCA
GCAAGGGATACGTTTTGGATTTCATAGCAGCAGCTTTGTGGAGAACATGGAAGGCTCGCAGGATGAGGACAATCTTA
GATTACTGGCCAGTGCAGCCTCTGGGAGTAGCAGGGATACTGAGACACCCACCGGCCATGCCAGCGGTTCTGGAGGA
GGAGCAGCAGGAGGACAATCCGAGAGCCGGCCTGGACCCTCCGGTGGAGGAGTAGCTGACTTGTTTCCTGAACTGCG
ACGGGTGCTTACTAGGTCTACGTCCAGTGGACAGGACAGGGGCATTAAGAGGGAAAGGAATCCTAGTGGGAATAATT
CAAGAACCGAGTTGGCTTTAAGTTTAATGAGCCGTAGGCGTCCTGAAACTGTTTGGTGGCATGAGGTTCAGAGCGAA
GGCAGGGATGAAGTTTCAATATTGCAGGAGAAATATTCACTAGAACAACTTAAGACCTGTTGGTTGGAACCTGAGGA
TGATTGGGAGGTGGCCATTAGGAATTATGCTAAGATATCTCTGAGGCCTGATAAACAGTATAGAATTACTAAGAAGA
TTAATATTAGAAATGCATGCTACATATCAGGGAATGGGGCAGAGGTTATAATAGATACACAAGATAAAGCAGCTTTT
AGATGTTGTATGATGGGTATGTGGCCAGGGGTTGTCGGCATGGAAGCAGTAACATTTATGAATATTAGGTTTAAAGG
GGATGGGTATAATGGCATTGTATTTATGGCTAACACTAAGCTGATTCTACATGGTTGTAGCTTTTTTGGGTTTAATA
ATACTTGTGTAGAAGCTTGGGGGCAAGTTAGTGTGAGGGGTTGTAGTTTTTATGCATGCTGGATTGCAACATCAGGT
AGGGTCAAGAGTCAGTTGTCTGTGAAGAAATGCATGTTTGAGAGATGTAATCTTGGCATACTGAATGAAGGTGAAGC
AAGGGTCCGCCACTGCGCAGCTACAGAAACTGGCTGCTTCATTCTAATAAAGGGAAATGCCAGTGTGAAGCATAATA
TGATCTGTGGACATTCGAATGAGAGGCCTTATCAGATGCTGACCTGCGCTGGTGGACATTGCAATATTCTGGCTACC
GTGCATATCGTTTCCCATGCACGCAAGAAATGGCCTGTATTTGAACATAATGTGATTACCAAGTGCACCATGCACAT
AGGTGGTCGCAGGGGAATGTTTATGCCTTACCAGTGTAACATGAATCATGTGAAGGTGATGTTGGAACCAGATGCCT
TTTCCAGAGTAAGCTTAACAGGAATCTTTGATATGAATATTCAACTATGGAAGATCCTGAGATATGATGACACTAAA
CCGAGGGTGCGCGCATGCGAATGCGGAGGCAAGCATGCTAGATTCCAGCCGGTGTGCGTGGATGTGACTGAAGACCT
GAGACCCGATCATTTGGTGCTTGCCTGCACTGGAGCGGAGTTCGGTTCTAGTGGTGAAGAAACTGACTAAAGTGAGT
AGTGGGACGAGCTGTGGAGGTGGGACTTTGAGGTTGGTAAGGTGGGCAGATTGGGTAAATTTTGTTAATTTCTGTCT
TGCAGCTGCCATGAGTGGAAGCGCTTCTTTTGAGGGGGGAGTATTTAGCCCTTATCTGACGGGCAGGCTCCCACCAT
GGGCAGGAGTTCGTCAGAATGTCATGGGATCCACTGTGGATGGGAGACCCGTCCAGCCCGCCAATTCCTCAACGCTG
ACCTATGCCACTTTGAGTTCGTCACCATTGGATGCAGCTGCAGCCGCCGCCGCTACTGCTGCCGCCAACACCATCCT
TGGAATGGGCTATTACGGAAGCATCGTTGCCAATTCCAGTTCCTCTAATAACCCTTCAACCCTGGCTGAGGACAAGC
TACTTGTTCTCTTGGCTCAGCTCGAGGCCTTAACCCAACGCTTAGGCGAACTGTCTAAGCAGGTGGCCCAGTTGCGT
GAGCAAACTCAGTCTGCTGTTGCCACAGCAAAGTCTAAATAAAGATCTTAAATCAATAAATAAAGAAATACTTGTTA
TAAAAACAAATGAATGTTTATTTGATTTTTCGCGCGCGGTATGCCCTGGACCATCGGTCTCGATCATTGAGAACTCG
GTGGATCTTTTCCAGTACCCTGTAAAGGTGGGATTGAATGTTTAGATACATGGGCATTAGTCCGTCCCGGGGGTGGA
GATAGCTCCATTGAAGAGCCTCTTGCTCCGGGGTAGTGTTATAAATCACCCAGTCATAGCAAGGTCGGAGTGCATGG
TGTTGCACAATATCTTTTAGGAGCAGACTAATTGCAACGGGGAGGCCCTTAGTGTAGGTGTTTACAAATCTGTTGAG
CTGGGACGGGTGCATCCGGGGTGAAATTATATGCATTTTGGACTGGATCTTGAGGTTGGCAATGTTGCCGCCTAGAT
CCCGTCTGGGGTTCATATTGTGCAGAACCACCAAGACAGTGTATCCGGTGCACTTGGGAAATTTATCATGCAGCTTA
GAGGGAAAAGCATGAAAAAATTTGGAGACGCCTTTGTGACCCCCCAGATTCTCCATGCACTCATCCATAATGATAGC
GATGGGGCCGTGGGCAGCGGCACGGGCGAACACGTTCCGGGGGTCTGAAACATCATAGTTATGCTCCTGAGTCAGGT
CATCATAAGCCATTTTAATAAACTTTGGGCGAAGGGTGCCAGATTGGGGGATGAAAGTTCCCTCTGGCCCGGGAGCA
TAGTTTCCCTCACATATTTGCATTTCCCAGGCTTTCAGTTCAGAGGGGGGGATCATATCCACCTGCGGGGCTATAAA
AAATACTGTTTCTGGAGCCGGGGTGATTAACTGGGATGAGAGCAAATTCCTAAGCAGCTGAGACTTGCCGCACCCAG
TGGGACCGTAAATGACCCCAATTACGGGTTGCAGATGGTAGTTTAGGGAGCGACAGCTGCCGTCCTCCCGGAGCAGG
GGGGCCACTTCGTTCATCATTTCCCTTACATGGATATTTTCCCGCACCAAGTCCGTTAGGAGGCGCTCTCCCCCAAG
GGATAGAAGCTCCTGGAGCGAGGAGAAGTTTTTCAGCGGCTTCAGCCCGTCAGCCATGGGCATTTTGGAAAGAGTCT
GTTGCAAGAGCTCGAGCCGGTCCCAGAGCTCGGTGATGTGCTCTATGGCATCTCGATCCAGCAGACCTCCTCGTTTC
GCGGGTTGGGACGGCTCCTGGAGTAGGGAATCAGACGATGGGCGTCCAGCGCTGCCAGGGTCCGATCCTTCCATGGT
CGCAGCGTCCGAGTCAGGGTTGTTTCCGTCACGGTGAAGGGGTGCGCGCCTGGTTGGGCGCTTGCGAGGGTGCGCTT
CAGACTCATCCTGCTGGTCGAGAACCGCTGCCGATCGGCGCCCTGCATGTCGGCCAGGTAGCAGTTTACCATGAGTT
CGTAGTTGAGCGCCTCGGCCGCGTGGCCTTTGGCACGGAGCTTACCTTTGGAAGTTTTATGGCAGGCGGGGCAGTAG
ATACATTTGAGGGCATACAGCTTGGGCGCGAGGAAAATGGATTCGGGGGAGTATGCATCCGCACCGCAGGAGGCGCA
GACGGTTTCGCACTCCACGAGCCATGTCAGATCCGGCTCATCGGGGTCAAAAACAAGTTTTCCGCCATGTTTTTTGA
TGCGTTTCTTACCTTTGGTTTCCATGAGTTCGTGTCCCCGCTGGGTAACAAAGAGGCTGTCCGTGTCCCCGTAGACT
GACTTTATGGGCCTGTCCTCGAGCGGAGTGCCGCGGTCCTCTTCGTAGAGGAACCCAGCCCACTCTGATACAAAAGC
GCGTGTCCAGGCCAGCACAAAGGAGGCCACGTGGGAGGGGTAGCGGTCGTTGTCAACCAGGGGGTCCACCTTCTCTA
CGGTATGTAAACACATGTCCCCCTCCTCCACATCCAAGAATGTGATTGGCTTGTAAGTGTAGGCCACGTGACCAGGG
GTCCCCGCCGGGGGGGTATAAAAGGGGGCGGGCCTCTGTTCGTCTTCACTGTCTTCCGGATCGCTGTCCAGGAGCGC
CAGCTGTTGGGGTAGGTATTCCCTCTCGAAGGCGGGCATGACCTCTGCACTCAGGTTGTCAGTTTCTAGGAACGAGG
AGGATTTGATATTGACAGTACCAGCAGAGATGCCTTTCATAAGACTCTCGTCCATCTGGTCAGAAAACACAATCTTC
TTGTTGTCCAGCTTGGTGGCAAATGATCCATAGAGGGCATTGGATAGAAGCTTGGCGATAGAGCGCATGGTTTGGTT
CTTTTCCTTGTCCGCGCGCTCCTTGGCGGCGATGTTAAGCTGGACGTACTCGCGCGCCACACATTTCCATTCAGGGA
AGATGGTTGTCAGTTCATCCGGAACTATTCTGACTCGCCATCCCCTATTGTGCAGGGTTATCAGATCCACACTGGTG
GCTACCTCGCCTCGGAGGGGCTCATTGGTCCAGCAGAGTCGACCTCCTTTTCTTGAACAGAAAGGGGGGAGGGGGTC
TAGCATGAACTCATCAGGGGGGTCCGCATCTATGGTAAATATTCCCGGTAGCAAATCCTTGTCAAAATAGCTGATGG
TGGCGGGATCATCCAAAGTCATCTGCCATTCTCGAACTGCCAGCGCGCGCTCATAGGGGTTAAGAGGGGTGCCCCAG
GGCATGGGGTGGGTGAGCGCGGAGGCATACATGCCACAGATATCGTAGACATAGAGGGGCTCTTCGAGGATGCCGAT
GTAAGTGGGATAACAGCGCCCCCCTCTGATGCTTGCTCGCACATAGTCATAGAGTTCATGTGAGGGGGCGAGAAGAC
CCGGGCCCAGATTGGTGCGGTTGGGTTTTTCCGCCCTGTAAACGATCTGGCGAAAGATGGCATGGGAATTGGAAGAG
ATAGTAGGTCTCTGGAATATGTTAAAATGGGCATGAGGGAGGCCTACAGAGTCCCTTATGAAGTGGGCATATGACTC
TTGCAGCTTGGCTACCAGCTCGGCGGTGACAAGTACGTCTAGGGCACAGTAGTCGAGAGTTTCCTGGATGATGTCAT
AACGCGGTTGGTTTTTCTTTTCCCACAGCTCGCGGTTGAGAAGGTATTCTTCGCGATCCTTCCAGTACTCTTCGAGG
GGAAACCCGTCTTTTTCTGCACGGTAAGAGCCCAACATGTAGAATTGATTGACTGCCTTGTAGGGACAGCATCCCTT
CTCCACTGGGAGAGAGTATGCTTGGGCTGCATTGCGCAGCGAGGTATGAGTGAGGGCAAAAGTGTCCCTGACCATGA
CTTTGAGGAATTGATACTTGAAGTCGATGTCATCACAGGCCCCCTGTTCCCAGAGTTGGAAGTCCACCCGCTTCTTG
TAGGCGGGGTTGGGCAAAGCGAAAGTAACATCATTGAAGAGGATCTTGCCGGCCCTGGGCATAAAATTTCGGGTGAT
TCTGAAAGGCTGAGGGACCTCTGCTCGGTTATTGATAACCTGAGCGGCCAAGACGATCTCATCAAAGCCATTGATGT
TGTGCCCCACTATGTACAGTTCTAAGAATCGAGGTGTGCCCCTGACATGAGGCAGCTTCTTGAGTTCTTCAAAAGTG
AGGTCTGTAGGGTCAGTGAGAGCATAGTGTTCGAGGGCCCATTCGTGCAGGTGAGGGTTCGCTTTGAGGAAGGAGGA
CCAGAGGTCCACTGCCAGTGCTGTTTGTAACTGGTCCCGGTACTGACGAAAATGCTGCCCGACTGCCATCTTTTCTG
GGGTGACGCAATAGAAGGTTTGGGGGTCCTGCTGCCAGCGATCCCACTTGAGTTTTATAGCCAGGTCATAGGCGATG
TTGACGAGCCGCTGGTCTCCAGAGAGTTTCATGACCAGCATGAAGGGGATTAGCTGCTTGCCAAAGGACCCCATCCA
GGTGTAGGTTTCCACATCGTAGGTGAGGAAGAGCCTTTCTGTGCGAGGATGAGAGCCAATCGGGAAGAACTGGATCT
CCTGCCACCAGTTGGAGGAATGGCTGTTGATGTGATGGAAGTAGAACTCCCTGCGACGCGCCGAGCATTCATGCTTG
TGCTTGTACAGACGGCCGCAGTACTCGCATCGATTCACGGGATGCACCTCATGAATGAGTTGTACCTGACTTCCTTT
GACGAGAAATTTCAGTGGAAAATTGAGGCCTGGCGCTTGTACCTCGCGCTCTACTATGTTGTCTGCATCGGCATGAC
CATCTTCTGTCTCGATGGTGGTCATGCTGACGAGCCCTCGCGGGAGGCAAGTCCAGACCTCGGCGCGGCAGGGGCGG
AGCTCGAGGACGAGAGCGCGCAGGTCGGAGCTGTCCAGGGTCCTGAGACGCTGCGGAGTCAGGTTAGTAGGCAGTGT
CAGGAGATTGACTTGCATGATCTTTTCGAGGGCGTGAGGGAGGTTCAGATGGTACTTGATCTCCACGGGTCCGTTGG
TGGAGATGTCGATGGCTTGCAGGGTTCCGTGCCCCTTGGGCGCTACCACCGTGCCCTTGTTTTTCCGTTTGGGCGGC
GGTGGCTCTGTTGCTTCTTGCATGTTTAGAAGCGGTGTCGAGGGCGCGCACCGGGCGGCAGGGGCGGCTCGGGACCC
GGCGGCATGGCCGGCAGTGGTACGTCGGCGCCGCGCGCGGGTAGGTTCTGGTACTGCGCCCTGAGAAGACTTGCATG
CGCGACGACGCGGCGGTTGACATCCTGGATCTGACGCCTCTGGGTGAACGCTACCGGCCCCGTGAGCTTGAACCTGA
AAGAGAGTTCAACAGAATCAATCTCGGTATCGTTGACGGCGGCTTGCCTAAGGATTTCTTGCACGTCGCCAGAGTTG
TCCTGGTAGGCGATCTCGGCCATGAACTGCTCGATCTCTTCCTCTTGAAGATCTCCGCGGCCCGCTCTCTCGACGGT
GGCCGCAAGGTCGTTGGAGATGCGTCCAATGAGTTGAGAGAATGCATTCATGCCCGCCTCGTTCCAGACGCGGCTGT
AGACCACAGCCCCCTCGGGATCTCTCGCGCGCATGACCACCTGGGCGAGGTTGAGCTCCACGTGGCGGGTGAAGACC
GCATAGTTGCATAGGCGCTGGAAAAGGTAGTTGAGTGTGGTGGCGATGTGCTCGGTGACGAAGAAATACATGATCCA
TCGTCTCAGCGGCATCTCGCTAACATCGCCCAGCGCTTCCAAGCGCTCCATGGCCTCGTAGAAGTCCACGGCAAAGT
TGAAAAACTGGGAGTTACGCGCGGACACGGTCAACTCCTCTTCCAGAAGACGGATGAGTTCGGCGATGGTGGTGCGC
ACCTCGCGCTCGAAAGCCCCCGGGATTTCTTCCTCAATTTCTTCTTCTTCCACTAACATCTCTTCCTCTTCAGGTGG
GGCTGCAGGAGGAGGGGGAACGCGGCGACGCCGGCGGCGCACAGGCAGACGGTCGATGAATCTTTCAATGACCTCTC
CGCGGCGGCGGCGCATGGTCTCGGTGACGGCACGACCGTTCTCCCTGGGTCTCAGAGTGAAGACGCCTCCGCGCATC
TCCCTGAAGTGGTGACTGGGAGGCTCTCCGTTGGGCAGGGACACCGCGCTGATTATGCATTTTATCAATTGCCCCGT
AGGTACTCCGCGCAAGGACCTGATCGTCTCAAGATCCACGGGATCTGAAAACCTTTCGACGAAAGCGTCTAACCAGT
CGCAATCGCAAGGTAGGCTGAGCACTGTTTCTTGCGGGCGGGGGCGGCTAGACGCTCGGTCGGGGTTCTCTCTTTCT
TCTCCTTCCTCCTCTTTGGAGGGTGAGACGATGCTGCTGGTGATGAAATTAAAATAGGCAGTTTTGAGACGGCGGAT
GGTGGCGAGGAGCACCAGGTCTTTGGGTCCGGCTTGTTGGATGCGCAGGCGATGGGCCATTCCCCAAGCATTATCCT
GACATCTGGCCAGATCTTTATAGTAGTCTTGCATGAGTCGTTCCACGGGCACTTCTTCTTCGCCCGCTCTGCCATGC
ATGCGAGTGATCCCGAACCCGCGCATGGGCTGGACAAGTGCCAGGTCCGCTACAACCCTTTCTGCGAGGATGGCTTG
CTGCACCTGGGTGAGGGTGGCTTGGAAGTCGTCAAAGTCCACGAAGCGGTGGTAAGCCCCGGTGTTGATTGTGTAGG
AGCAGTTGGCCATGACTGACCAGTTGACTGTCTGGTGCCCCGGACGCACAATCTCGGTGTACTTGAGGCGCGAGTAG
GCGCGGGTGTCAAAGATGTAATCGTTACAGGTGCGCACCAGGTACTGGTAGCCGATGAGAAAGTGAGGCGGCGGCTG
GCGGTATAGGGGCCATCGCTCTGTAGCCGGGGCGCCAGGGGCGAGGTCTTCCAGCATGAGGCGGTGATAACCGTAGA
TGTACCTGGACATCCAGGTGATACCGGAGGCGGTGGTGGATGCCCGCGGGAACTCGCGTACGCGGTTCCAGATGTTG
CGCAGCGGCATGAAGTAGTTCATGGTAGGCACGGTTTGGCCCGTGAGACGCGCACAGTCGTTGATGCTCTAGACATA
CGGGCAAAAACGAAAGCGGTCAGCGGCTCGTCTCCGTGGCCTGGAGGCTAAGCGAACGGGTTGGGCTGCGCGTGTAC
CCCGGTTCGAATCTCGGATCAGGCTGGAGCCGCAGCTAACGTGGTACTGGCACTCCCGTCTCGACCCAGGCCTGCAC
AAAACCTCCAGGATACGGAGGCGGGTCGTTTTTTTTTTGCTTTTTCCTGGATGGGAGCCAGTGCTGCGTCAAGCTTT
AGAACACTCAGTTCTCGGGGCTGGGAGTGGCTCGCGCCCGTAGTCTGGAGAATCAATCGCCAGGGTTGCGTTGCGGT
GTGCCCCGGTTCGAGTCTTAGCGCGCCGGATCGGCCGGTTTCCGCGACAAGCGAGGGTTTGGCAGCCTCGTCATTTC
TAAGACCCCGCCAGCCGACTTCTCCAGTTTACGGGAGCGAGCCCTCTTTTTTTTGTTTTTTGTTGCCCAGATGCATC
CCGTGCTGCGACAGATGCGCCCCCAGCAACAGCCCCCTTCTCAGCAGCAGCTACAACAACAGCCACAAAAGGCTCTT
CCTGCTCCTGTAACTACTGCGGCTGCAGCCGTCAGCGGCGCGGGACAGCCCGCCTATGATCTGGACTTGGAAGAGGG
CGAGGGATTGGCGCGCCTGGGGGCTCCATCGCCCGAGCGGCACCCGCGGGTGCAACTAAAAAAGGACTCTCGCGAGG
CGTACGTGCCCCAACAGAACCTATTCAGGGACAGGAGCGGCGAGGAGCCAGAGGAGATGCGAGCATCTCGATTTAAC
GCGGGTCGCGAGCTGCGCCACGGTCTGGATCGAAGACGGGTGCTGCAAGACGAGGATTTTGAGGTCGATGAAGTGAC
AGGGATCAGCCCAGCTAGGGCACATGTGGCCGCGGCCAACCTAGTCTCGGCCTACGAGCAGACCGTGAAGGAGGAGC
GCAACTTCCAAAAATCTTTTAACAACCATGTGCGCACCCTGATCGCCCGCGAGGAAGTGACCCTGGGTCTGATGCAC
CTGTGGGACCTGATGGAGGCTATCACCCAGAACCCCACTAGCAAACCCCTGACAGCTCAGCTGTTTCTGGTGGTTCA
ACATAGCAGGGACAACGAGGCATTCAGGGAGGCGTTGTTGAATATCACCGAGCCTGATGGGAGATGGCTGTATGATC
TGATTAACATCCTGCAAAGTATTATAGTGCAGGAACGTAGCCTGGGTTTGGCTGAGAAAGTGGCAGCTATCAACTAC
TCGGTCTTGAGCCTGGGCAAATACTACGCTCGCAAGATCTACAAGACCCCCTACGTACCCATTGACAAGGAGGTGAA
GATAGATGGGTTTTACATGCGCATGACTCTCAAGGTGTTGACTTTAAGCGACGATCTGGGGGTGTATCGCAATGACA
GGATGCACCGCGCGGTGAGCGCCAGCAGGAGGCGCGAGCTGAGCGACAGAGAACTTATGCACAGCTTGCAAAGGGCT
CTAACGGGGGCCGGAACTGATGGGGAGAACTACTTTGACATGGGAGCGGACTTGCAATGGCAACCCAGTCGCAGGGC
CATGGAGGCTGCAGGGTGTGAGCTTCCTTACATAGAAGAGGTGGATGAAGTCGAGGACGAGGAGGGCGAGTACTTGG
AAGACTGATGGCGCGACCCGTATTTTTGCTAGATGGAACAACAGCAGGCACCGGACCCCGCAATGCGGGCGGCGCTA
CAGAGCCAGCCGTCCGGCATTAACTCCTCGGACGATTGGACCCAGGCCATGCAACGTATAATGGCGCTGACGACCCG
CAACCCCGAAGCCTTTAGACAGCAACCCCAGGCCAACCGCCTTTCGGCCATACTGGAGGCCGTAGTGCCCTCCCGCT
CCAACCCCACCCACGAGAAGGTCCTGGCTATCGTGAACGCGCTGGTGGAGAACAAGGCCATCCGTCCCGATGAGGCC
GGGCTGGTATACAATGCTCTTTTGGAGCGCGTGGCCCGTTACAACAGCAGCAACGTGCAGACCAACCTGGACCGGAT
GGTGACCGATGTGCGCGAGGCTGTGTCTCAGCGCGAGCGGTTCCAGCGCGACGCCAACTTGGGGTCATTGGTAGCGC
TAAACGCTTTCCTTAGCACCCAGCCCGCCAACGTGCCCCGTGGTCAGCAAGACTATACAAACTTTTTGAGTGCATTG
AGACTCATGGTATCTGAGGTGCCCCAGAGCGAGGTGTACCAGTCCGGGCCAGATTACTTCTTCCAGACCAGCAGACA
GGGCTTGCAGACAGTGAACCTGACCCAGGCTTTCAAGAACCTGAAGGGTCTGTGGGGAGTGCACGCCCCAGTAGGAG
ATCGCGCGACCGTGTCTAGCTTGCTGACTCCCAACTCCCGCCTGCTGCTGCTGCTGGTATCCCCCTTCACTGACAGC
GGTAGCATCGACCGCAACTCCTACTTGGGCTACCTGCTTAACCTGTATCGCGAGGCTATAGGACAGAGCCAGGTGGA
CGAGCAGACCTATCAAGAAATCACCCAAGTGAGCCGCGCCCTGGGTCAGGAAGACACAGGCGGTTTGGAAGCCACCC
TGAACTTCTTACTAACCAACCGGTCGCAGAAGATCCCTCCTCAGTATGCGCTTACCGCTGAGGAGGAGCGGATCCTA
AGATACGTGCAACAGAGCGTTGGACTGTTTTTGATGCAGGAGGGGGCGACACCTACCGCCGCGCTGGATATGACAGC
TCGAAACATGGAGCCCAGCATGTATGCTAGTAACAGGCCTTTCATTAACAAACTGCTGGACTACCTGCACAGGGCGG
CCGCCATGAACTCTGATTATTTCACCAATGCTATTCTGAACCCACACTGGCTGCCCCCACCTGGTTTCTACACTGGC
GAATACGACATGCCCGATCCCAATGACGGGTTCCTATGGGACGATGTGGACAGTAGCATATTTTCCCCGCCGCCAGG
TTATACGGTTTGGAAGAAGGAAGGGGGCGATAGAAGGCACTCTTCCGTATCGTTGCCCGGAACGGCTGGTGCTGCCG
CGGCCGTGCCCGAAGCTGCGAGTCCTTTCCCTAGCTTGTCCTTTTCACTAAACAGCGTTCGCAGCAGTGAACTGGGG
AGAATAAACCGCCCGCGCTTGATGGGCGAGGATGAGTACTTGAATGACTCTTTGCTGAGGCCAGAGAGGGAAAAGAA
CTTCCCTAACAATGGAATAGAGAGCCTGGTGGATAAGATGAGTAGATGGAAGACCTATGCGCAGGATCACAGAGACG
AGCCCAGGATCTTGGGGGCTACAAGCAGACCGAGCCGTAGACGCCAGCGCCACGACAGGCAGATGGGTCTTGTGTGG
GACGACGAGGACTCTGCCGATGACAGCAGCGTGTTGGACTTGGGTGGAAAAGGAGTTGGCAACCCGTTCGCTCATCT
GCGTCCCCGTTTCGGTCGCATGTTGTAAAAGTGAAAGTAAAAATAAAAAGGCAACTCACCAAGGCCATGGCAACCGA
GCGTGCGTTCGTTCTTTTTTTTGTTATCTGTATCTAGTACGATGAGGAGACGAGCCGTGCTAGGCGGAGCGGTGGTG
TATCCGGAGGGTCCTCCTCCTTCTTACGAGAGCGTGATGCAGCAACAGGCGGCGATGATACAGCCCCCACTGGAGGC
TCCCTTCGTACCCCCTCGGTACCTGGCGCCTACGGAAGGGAGAAATAGCATTCGTTACTCGGAGCTGTCACCCCAGT
ACGATACCACCAAGTTGTATCTGGTGGACAACAAGTCGGCGGACATCGCCTCCCTGAACTATCAGAACGACCACAGC
AACTTCCTGACCACAGTGGTGCAGAACAATGACTTTACCCCCACGGAGGCTAGCACCCAGACCATTAACTTTGACGA
GCGGTCGCGGTGGGGCGGTCAGCTGAAGACCATTATGCACACCAACATGCCCAACGTGAACGAGTACATGTTCAGCA
ACAAGTTTAAGGCGAGGGTGATGGTATCTAGGAAGGCTCCTGAAGGTGTTACAGTAAATGATCATAAAGATGATATT
TTGAAATATGAGTGGTTTGAGTTCACTTTACCAGAAGGTAACTTCTCAGCTACCATGACCATCGACCTGATGAACAA
TGCCATCATTGACAACTACCTGAAAATTGGCAGACAGAATGGAGTGCTGGAAAGTGACATTGGTGTTAAGTTTGACA
CTAGAAACTTCAGGCTCGGGTGGGACCCCGAAACTAAGTTGATTATGCCAGGGGTCTACACTTATGAGGCATTCCAT
CCTGACATTGTTTTGTTGCCTGGTTGCGGGGTAGATTTTACTGAAAGCCGACTTAGCAACTTGCTTGGCATCAGGAA
GAGACATCCATTCCAGGAGGGTTTCAAAATCATGTATGAAGATCTTGAAGGGGGTAATATTCCTGCCCTTTTGGATG
TCACTGCCTATGAGGAAAGCAAAAAGGATACCACTACTGAAACAGGCGAAAAGGCGGTGGTTAAAACAACCACAGTG
GCTGTTGCAGAGGAAACCAGTGAAGATGATAATATAACTAGAGGAGATACTTATATAACTGAAAAACAAAAACGTGA
AGCTGCAGCTGCAGAACTATTACTTATGTCTGAAGTTAAAAAAGAGTTAAAGATCCAACCTTTAGAAAAAGACAGCA
AGAATAGAAGCTACAATGTCTTGGAAGACAAAATCAACACAGCCTACCGCAGCTGGTACCTGTCCTACAATTATGGT
AACCCTGAGAAAGGAATAAGGTCCTGGACACTGCTCACCACTTCGGATGTCACCTGTGGAGCCGAGCAGGTCTACTG
GTCGCTCCCCGACATGATGCAAGACCCCATCACCTTCCGCTCCTCGAGACAAGTCAACAACTACCCAGTAGTGGGTG
CAGAGCTTATGCCGGTCTTCTCAAAGAGTTTCTACAATGAGCAAGCCGTGTACTCTCAGCAGCTCCGACAGTCCACC
TCGCTCACGCACGTCTTCAACCGCTTCCCTGAGAACCAGATCCTCATCCGCCCGCCGGCGCCCACAATTACCACCAT
CAGTGAAAACGTTCCTGCTCTCACAGATCACGGGACCCTGCCGTTACGCAGCAGTATCCGGGGAGTCCAGCGCGTGA
CCGTTACTGACGCCAGACGTCGCACCTGTCCCTACGTTTACAAGGCCCTGGGCATAGTCGCGCCGCGCGTTCTTTCA
AGCCGCACTTTCTAAAAAAAAAAAAAAATGTCCATTCTCATCTCGCCCAGTAATAATACCGGTTGGGGACTGCATGC
GCCCACCAAGATGTACGGAGGCGCCCGCAAACGCTCTACCCAGCACCCCGTGCGCGTTCGCGGTCATTTCCGCGCTC
CCTGGGGCGCCCTCAAGGGCCGTACCCGCACTCGGACCACGGTCGATGATGTGATCGACCAGGTGGTTGCCGATGCT
CGTAATTATACTCCTACTGCGCCTACATCTACTGTGGATGCAGTTATTGACAGTGTAGTGGCAGACGCTCGCGCCTA
TGCTCGCCGGAAGAGCCGAAGGAGGCGCATCGCCAGGCGCCACAGGGCTACTCCCGCTATGCGAGCTGCAAAAGCTA
TTCTGCGGAGGGCCAAACGTGTGGGACGAAGAGCCATGCTTAGAGCGGCCAGACGCGCGGCTTCTGGTGCTAGCAGC
GGCAGGTCCCGCAGGCGCGCGGCCACGGCGGCAGCAGCGGCCATTGCCAACATGGCCCAACCGCGAAGAGGCAATGT
GTATTGGGTGCGCGATGCCACTACCGGCCAGCGCGTGCCCGTGCGCACCCGCCCCCCTCGCACTTAGAAGATACTGA
GCAGTCTCCGATGTTGTGTCCCAGCGGCAAGTATGTCCAAGCGCAAATACAAGGAAGAGATGCTCCAGGTCATCGCG
CCTGAAATCTACGGTCCGCCGATGAAGGATGAAAAAAAGCCCCGCAAAATCAAGCGGGTTAAAAAGGACAAAAAAGA
AGAAGATGGCGATGATGGACTGGTGGAGTTTGTGCGCGAGTTCGCGCCAAGACGGCGCGTGCAGTGGCGCGGTCGAA
AAGTACGCCAAGTGCTTAGACCCGGGACCACTGTGGTCTTTACACCTGGCGAGCGTTCCAGCACTACTTTTAAACGG
TCCTATGATGAGGTGTATGGGGATGACGATATTATTGAGCAGGCGGCAGACCGCCTTGGCGAGTTTGCTTATGGCAA
GCGCACAAGATCCAGTCCCAAAGAGGAGGCGGTATCTATTCCCTTGGATCATGGAAATCCCACCCCTAGCCTCAAAC
CAGTCACCCTGCAGCAAGTGCTGCCCGTACCTGCGAGCAGAGGCGTAAAGCGCGAGGGTGAGGACCTATATCCCACC
ATGCAGCTAATGGTGCCCAAGCGGCAGAGATTAGAAGACGTACTGGAGAAAATGAAAGTGGATGCCGATATCCAGCC
TGAGGTGAAAGTGAGACCCATCAAGGAAGTGGCGCCAGGTTTGGGAGTACAAACCTTTGACATCAAGATTCCCACTG
AGTCCATGGAAGTGCAGACCGAACCTGCAAAACCCACAGTCACCTCAATTGAGGTTCAGACGGAACCCTGGATGCCC
GCGCCCGTTGCCGCCCCCAGCACCACTAGAAGATCACGTCGAAAGTATGGCCCAGCAAGTCTGCTAATGCCCAACTA
TGCTCTGCACCCATCCATCATTCCCACTCCGGGTTACAGAGGCACTCGCTACTATCGAAGTCGGAGCAACACCTCAC
GCCGCCGCAAACTACCTGCAAGTCGCACTCGCCGTCGCCGCCGCCGCACCACTGCCAGCAAATTAACTCCCGCCGCC
CTGGTGCGGAGAGTGTACCGCGATGGTCGCGCTGAACCTCTGACGCTGCCGCGCGCGCGCTATCATCCAAGCATCAC
CACTTAATGACTGTTGACGCTGCCTCCTTGCAGATATGGCTCTCACTTGCCGCCTTCGCGTCCCCATTACTGGCTAC
CGAGGAAGAAACTCGCGCCGTAGAAGGATGTTGGGGCGAGGGATGCGCCGCCACAGACGAAGGCGCGCTATCAGCAA
GCGATTAGGGGGTGGCTTTCTGCCAGCTCTTATACCCATCATCGCCGCGGCGATCGGGGCGATACCAGGCATAGCTT
CCGTGGCGGTTCAGGCCTCGCAGCGCCACTAACAATGGAAAAATTTATAAATAAAAAATAGAATGGACTCTGACGCT
CCTGGTCCTGTGACTATGTTTTTGTAGAGATGGAAGACATCAATTTTTCATCCCTGGCTCCGCGACACGGCACGAGG
CCGTACATGGGCACCTGGAGCGACATCGGCACGAGCCAACTGAACGGGGGCGCCTTCAATTGGAGCAGTATCTGGAG
CGGGCTTAAAAATTTTGGCTCGACCATAAAAACCTATGGGAACAAAGCTTGGAACAGCAGCACAGGGCAGGCCCTTA
GAAATAAGCTTAAGGAGCAGAACTTCCAACAAAAGGTGGTCGATGGTATCGCCTCTGGTATTAACGGCGTAGTGGAT
CTAGCCAACCAGGCTGTGCAGAAACAGATAAACAGCCGCCTGGACCCGCCGCCCGCAACTCCTGGTGAAATGGAAGT
GGAGGAAGAGCTTCCTCCGCTGGAGAAGCGGGGCGACAAGCGACCGCGTCCCGAGCTGGAACAGACGTTGGTGACGC
GCGCAGACGAGCCCCCTTCATACGAGGAGGCAGTAAAGCTCGGAATGCCCACTACCAGGCCTGTAGCTCACATGGCT
ACCGGGGTGATGAAACCTTCTCAGTCGCATCGGCCTGCCACCTTGGACTTGCCTCCTCCCCCTGCTTCTGCGGCGCC
TATTCCCAAACCTGTCGCTACCAGAAAGCCCACCGCCGTACAGCCCGTCGCCGTAGCCAGACCGCGTCCTGGGGCAC
ACCGCGCCCGAAAGCAAACTGGCAGAGTACTCTGAACAGCATCGTGGGTCTGGGCGTGCAGAGTGTAAAGCGCCGTC
GCTGCTATTAATTAAATATGGAGTAGCGCTTAACTTGCTTGTCTGTGTGTATGTATCATCACCATGCCGCCGCAGCA
GAGGAGAAAGGAAGAGGTCGCGCGCCGAGGCTGAGTTGCTTTCAAGATGGCCACCCCATCGATGATGCCCCAATGGG
CATACATGCACATCGCCGGACAGGATGCTTCGGAGTACCTGAGTCCGGGTCTGGTGCAGTTCGCCCGTGCAACAGAC
ACCTACTTCAGTATGGGGAACAAGTTTAGAAACCCCACAGTGGCGCCCACCCACGATGTGACCACCGACCGTAGCCA
GCGACTAATGCTGCGCTTCGTGCCCGTTGACCGGGAAGACAATACCTACTCTTACAAAGTTCGCTACACGCTGGCTG
TAGGGGACAACAGAGTACTGGATATGGCCAGCACGTTCTTTGACATCCGCGGCGTGCTGGACCGGGGCCCTAGCTTC
AAACCCTACTCCGGGACCGCCTACAACAGCCTGGCTCCCAAGGGAGCGCCCAACACCTGCCAGTGGAAGGATTCTGA
CAGCAAAATGCATACCTTTGGGGTAGCTGCCATGCCCGGTGTTACTGGGAAAAAGATAGAAGCTGATGGGCTGCCTA
TTGGAATAGATTCAACTTCTGGAACTGACACAGTAATTTATGCTGATAAAACTTTCCAACCAGAACCACAAGTTGGA
AATGCCAGTTGGGTTGACGCCAATGGTACAGAGGAAAAATATGGAGGCAGAGCTCTGAAGGACACTACAAAGATGAA
ACCCTGCTATGGTTCTTTCGCCAAGCCTACCAACAAAGAAGGTGGTCAGGCTAACTTAAAAGATTCAGAAACCGCCG
CCACCACTCCTAACTATGATATAGATCTGGCTTTCTTTGACAACAAAAATATTGCTGCTAACTACGATCCAGATATT
GTAATGTACACAGAAAATGTTGACTTGCAGACTCCAGATACTCATATTGTATACAAACCTGGAACAGAGGACACCAG
CTCTGAATCCAATTTGGGTCAGCAAGCCATGCCTAACAGACCCAACTACATTGGCTTCAGAGACAATTTTATTGGGC
TCATGTACTACAACAGCACTGGCAATATGGGGGTGCTGGCCGGTCAGGCCTCTCAGCTGAATGCTGTGGTTGACTTG
CAAGACAGAAACACTGAACTGTCCTACCAGCTCTTGCTTGACTCTCTGGGTGACAGAACCCGGTATTTCAGTATGTG
GAATCAGGCGGTGGACAGCTATGATCCTGATGTGCGTATTATTGAAAACCATGGTGTGGAGGACGAATTGCCAAACT
ATTGCTTTCCGTTGAATGGTGTGGGATTTACAGACACTTACCAAGGTGTTAAAGTTAAAACAGATGCAGTTGCTGGA
ACCAGTGGAACACAGTGGGACAAAGATGACACCACAGTTAGTACTGCTAATGAAATCCATGGAGGCAATCCTTTTGC
CATGGAAATCAACATCCAAGCCAATCTATGGCGAAGTTTCCTTTATTCCAATGTGGCTTTGTATCTCCCAGACTCGT
ATAAATACACCCCGTCCAATGTCACTCTCCCAGAAAACAAAAACACCTACGACTACATGAACGGGCGGGTGGTGCCG
CCATCTCTAGTAGACACCTATGTGAACATTGGTGCCAGGTGGTCTCTGGATGCCATGGACAATGTCAACCCATTCAA
CCACCACCGTAACGCTGGCTTGCGTTACCGATCCATGCTTCTGGGTAACGGACGTTATGTGCCTTTCCACATACAAG
TGCCTCAAAAATTCTTCGCTGTTAAAAACCTGCTGCTTCTCCCAGGCTCCTACACTTATGAGTGGAACTTTAGGAAG
GATGTAAACATGGTTCTACAGAGTTCCCTTGGTAACGACCTACGGGTAGATGGCGCCAGCATCAGTTTCACGAGCAT
CAATCTTTATGCTACTTTTTTCCCCATGGCTCACAACACCGCTTCCACCCTTGAAGCCATGCTGCGGAATGACACCA
ATGATCAGTCATTCAACGACTACCTATCTGCAGCTAACATGCTCTACCCCATACCTGCCAACGCAACCAATATTCCC
ATTTCCATTCCTTCTCGCAACTGGGCGGCTTTCAGAGGCTGGTCATTTACCAGACTGAAAACCAAAGAAACTCCCTC
TTTGGGGTCTGGATTTGACCCATACTTTGTCTATTCCGGTTCTATTCCCTACCTGGATGGTACCTTCTATCTAAATC
ACACTTTTAAGAAGGTTTCCATCATGTTTGACTCTTCAGTGAGCTGGCCTGGAAATGACAGGTTACTATCTCCTAAC
GAATTTGAAATAAAGCGCACTGTGGATGGCGAAGGCTACAACGTAGCCCAATGCAACATGACCAAAGACTGGTTCTT
GGTACAGATGCTCGCCAACTACAACATTGGCTACCAGGGCTTTTACATCCCTGAGGGATACAAGGATCGCATGTACT
CCTTTTTCAGAAACTTCCAGCCTATGAGCAGGCAGGTGGTTGATGAGGTTAATTACACTGACTACAAAGCCGTCACC
TTACCATATCAACACAACAACTCTGGCTTTGTAGGATACCTTGCGCCTACTATGAGACAAGGGGAACCTTACCCAGC
CAATTATCCATACCCGCTCATCGGAACTACTGCCGTTAAGAGTGTTACCCAAAAAAAGTTCCTGTGCGACAGGACCA
TGTGGCGCATACCGTTCTCCAGCAACTTCATGTCCATGGGGGCCCTTACAGACCTGGGACAAAACCTGCTCTATGCC
AACTCGGCCCATGCACTGGACATGACTTTTGAGGTGGATCCCATGGATGAGCCCACCCTGCTTTATCTTCTTTTCGA
AGTCTTCGACGTGGTCAGAGTGCACCAGCCACACCGCGGCGTCATCGAGGCCGTCTACCTGCGCACACCGTTCTCGG
CCGGCAACGCCACCACATAAGAAGCCTCTTGCTTCTTGCAAGCAGCAGCTGCAGCCATGTCATGCGGGTCCGGAAAC
GGCTCCAGCGAGCAAGAGCTCAAAGCCATCGTCCGAGACCTGGGTTGCGGTCCCTATTTCCTGGGAACCTTTGACAA
GCGTTTCCCGGGGTTCATGGCCCCCGACAAGCTCGCCTGCGCCATAGTCAACACTGCCGGACGCGAGACGGGGGGAG
AGCACTGGCTGGCTTTTGGTTGGAACCCGCGCTCCAACACCTGCTACCTTTTTGATCCTTTTGGGTTCTCGGATGAG
CGACTCAAACAGATTTACCAGTTTGAGTACGAGGGGCTCCTGCGCCGCAGTGCCCTTGCTACCAAAGACCGCTGCAT
CACCCTGGAAAAGTCCACCCAGAGCGTGCAGGGCCCACGCTCAGCCGCCTGTGGACTTTTTTGCTGTATGTTCCTTC
ATGCCTTTGTGCACTGGCCCGACCGTCCCATGAACGGAAACCCCACCATGAAGTTGCTGACTGGGGTGCCCAACAGC
ATGCTCCAATCTCCCCAAGTCCAGCCCACCCTGCGCCGCAACCAGGAGGCACTATACCGCTTCCTAAACACCCACTC
ATCTTACTTTCGTTCTCACCGCGCACGCATCGAAAGGGCCACCGCGTTTGACCGTATGGATATGCAATAAGTCATGT
AAAACCGTGTTCAATAAAAAGCACTTTATTTTTACATGCACTAAGGCTCTGGTTTTTTGCTCATTCGTTTTCATCAT
TCACTCAGAAATCAAATGGGTTCTGGCGGGAGTCATAGTGGCCCGCGGGCAGGGATACGTTGCGGAACTGTAACCTG
TTCTGCCACTTGAACTCGGGGATCACCAGCTTGGGAACTGGAATCTCGGGAAAGGTGTCTTGCCACAACTTTCTGGT
CAGTTGCAGGGCGCCAAGCAGGTCAGGAGCAGAGATCTTGAAATCACAGTTGGGGCCGGCATTCTGGACACGGGAGT
TGCGGTACACTGGGTTGCAACACTGGAACACCATCAAGGCTGGGTGTCTCACGCTTGCCAGCACGGTCGGGTCACTG
ATGGTAGTCACATCCAAGTCTTCAGCATTGGCCATCCCAAAGGGGGTCATCTTACAGGTCTGCCTGCCCATCACGGG
AGCGCAGCCTGGCTTGTGGTTGCAATCGCAATGAATGGGAATCAGCATCATCCTGGCTTGGTCGGGGGTTATCCCTG
GATATACGGCCTTCATGAAGGCTTCGTACTGCTTGAAAGCTTCCTGAGCCTTACTTCCCTCGGTGTAGAACATTCCA
CAGGACTTGCTGGAAAATTGGTTAGTAGCACAGTTGGCATCATTTACACAGCAGCGGGCATCGTTGTTGGCCAACTG
AACCACATTTCTGCCCCAGCGGTTCTGGGTGATCTTGGCTCTGTCTGGGTTCTCCTTCATAGCGCGCTGCCCGTTCT
CGCTCGCCACATCCATCTCGATAATGTGGTCCTTCTGGATCATGATAGTGCCATGCAGGCATTTCACCTTGCCTTCG
TAATCGGTGCATCCATGAGCCCACAGAGCGCACCCGGTGCACTCCCAATTATTGTGGGCGATCTCAGAATAAGAATG
CACCAATCCCTGCATGAATCTTCCCATCATCGCTGTCAGGGTCTTCATGCTACTAAATGTCAGCGGAATGCCACGGT
GCTCCTCGTTCACATACTGGTGGCAGATACGCTTGTACTGCTCGTGCTGCTCTGGCATCAGCTTGAAAGAGGTTCTC
AGGTCATTATCCAGCCTATACCTCTCCATTAGCACAGCCATCACTTCCATGCCCTTCTCCCAGGCAGATACCAGGGG
CAAGCTCAAAGGATTCCTAACAGCAATAGAAGTAGCTCCTTTAGCTATAGGGTCATTCTTGTCGATCTTCTCAACAC
TTCTCTTGCCATCCTTCTCAATGATGCGCACCGGGGGGTAGCTGAAGCCCACGGCCACCAACTGAGCCTGTTCTCTT
TCTTCTTCGCTGTCCTGGCTGATGTCTTGCAGAGGGACATGCTTGGTCTTCCTGGGCTTCTTCTTGGGAGGGATCGG
GGGAGGACTGTTGCTCCGTTCCGGAGACAGGGATGACCGCGAAGTTTCGCTTACCAGTACCACCTGGCTCTCGATAG
AAGAATCGGACCCCACGCGACGGTAGGTGTTCCTCTTCGGGGGCAGAGGTGGAGGCGACTGAGATGGGCTGCGGTCT
GGCCTTGGAGGCGGATGGCTGGCAGAGCCCATTCCGCGTTCGGGGGTGTGCTCCCGTTGGCGGTCGCTTGACTGATT
TCCTCCGCGGCTGGCCATTGTGTTCTCCTAGGCAGAGAAACAACAGACATGGAAACTCAGCCATCACTGCCAACATC
GCTGCAAGCGCCATCACACCTCGCCCCCAGCAGCGACGAGGAGGAGAGCTTAACCACCCCACCACCCAGTCCCGCTA
CCACCACCTCTACCCTCGATGATGAGGAGGAGGTCGACGCAGCCCAGGAGATGCAGGCGCAGGATAATGTGAAAGCG
GAAGAGATTGAGGCAGATGTCGAGCAGGACCCGGGCTATGTGACACCGGCGGAGCACGAGGAGGAGCTGAAACGTTT
TCTAGACAGAGAGGATGACGACCGCCCAGAGCATCAAGCAGATGGCGATCACCAGGAGGCTGGCCTCGGGGATCATG
TTGCCGACTACCTCTCCGGGCGTGGGGGGGAGGACGTGCTCCTCAAACATCTAGCAAGGCAGTCGCTCATAGTTAAA
GACGCACTACTCAACCTCACCGAAGTGCCCATCAGTGTGGAAGAGCTTAGCCGCGCCTACGAGCTGAACCTCTTTTC
GCCTCAGATACCCCCCAAGCGGCAGCCAAACGGCACCTGCGAGGCCAACCCTCGACTCAACTTCTATCCAGCTTTTA
CTGTCCCCGAAGTGCTGGCCACCTACCACATCTTTTTTAAGAACCAAAAGATTCCAGTCTCCTGCCGCGCCAACCGC
ACCCGCGCAGATGCCCTTCTCAACTTGGGTCCGGGAGCTCGCTTACCTGATATAGCTTCCTTGGAAGAGGTTCCAAA
GATCTTTGAGGGTCTGGGAAGTGATGAGACTCGGGCCGCAAATGCTCTGCAACAGGGAGAGAATGGCATGGATGAAC
ATCACAGCGCTCTAGTGGAACTGGAGGGTGACAATGCCCGGCTTGCAGTGCTCAAGCGCAGTATCGTGGTCACCCAT
TTTGCCTACCCCGCTGTTAACCTGCCGCCCAAAGTCATGAGCGCTGTCATGGACCATCTGCTCATCAAACGAGCAAG
TCCACTTTCAGAAAACCAGAACATGCAGGATCCAGACGCCTCGGACGAGGGCAAGCCGGTAGTCAGTGACGAGCAGC
TATCTCGCTGGCTGGGTACCAACTCCCCCCGAGATTTGGAAGAAAGACGCAAGCTTATGATGGCTGTAGTGCTAGTA
ACTGTTGAGTTGGAGTGTCTGCGCCGCTTTTTTACCGACCCCGAGACCCTGCGCAAGCTAGAGGAGAACCTGCACTA
CACCTTCAGACATGGCTTCGTGCGGCAGGCATGCAAGATCTCCAACGTGGAGCTCACCAACCTGGTTTCATACATGG
GCATTTTGCATGAGAACCGGCTAGGGCAGAGCGTTCTGCACACCACCCTGAAGGGGGAGGCCCGCCGCGACTACATC
CGAGACTGTGTCTACCTCTACCTCTGCCATACCTGGCAGACTGGTATGGGTGTGTGGCAACAGTGTTTGGAAGAGCA
GAACCTTAAAGAGCTGGACAAGCTCTTGCAGAGATCCCTCAAAGCCCTGTGGACAGGTTTTGACGAGCGCACCGTCG
CCTCGGACTTGGCGGACATCATCTTCCCCGAGCGTCTTACGGTTACTCTGCGAAACGGCCTGCCAGACTTCATGAGC
CAGAGCATGCTTAACAACTTTCGCTCTTTCATCCTGGAACGCTCCGGTATCCTGCCTGCCACCTGCTGTGCGCTGCC
CTCCGACTTTGTGCCTCTCACCTACCGCGAGTGCCCACCGCCGCTATGGAGCCACTGCTACCTATTCCGCCTGGCCA
ACTACCTCTCCTACCACTCGGATGTGATAGAGGATGTGAGCGGAGACGGCCTGCTGGAATGCCACTGCCGATGCAAT
TTATGCACACCCCACCGCTCCCTCGCCTGCAACCCCCAGTTGCTAAGCGAGACCCAGATCATCGGCACCTTCGAGTT
GCAGGGTCCCAACAGTGAAGGCGAGGGGTCTTCTCCGGGGCAGAGTCTGAAACTGACACCGGGGCTGTGGACCTCCG
CCTACCTGCGCAAGTTTCATCCCGAGGACTATCATCCCTATGAGATCAGGTTCTATGAGGACCAGTCACATCCTCCC
AAAGTCGAGCTCTCAGCCTGCGTCATCACCCAGGGGGCAATTCTGGCCCAATTGCAAGCCATCCAAAAATCCCGCCA
AGAATTTCTGCTGAAAAAGGGAAGCGGGGTCTACCTTGACCCCCAGACCGGTGAGGAGCTCAACACAAGGTTCCCCC
AGGATGTCCCATCGCCGAGGAAGCAAGAAGCTGAAGGTGCAGCTGTCACCCCCAGAGGATATGGAGGAAGACTGGGA
CAGTCAGGCAGAGGAGGAGATGGAAGATTGGGACAGCCAGGCAGAGGAGGTGGACAGCCTGGAGGAAGACAGTTTGG
AGGAGGAAGACGAGGAGGCAGAGGAGGTGGAAGAAGCAACCGCCGCCAAACAGTTGTCATCGGCGGCGGAGACAAGC
AAGTCCCCAGACAGCAGCACGGCTACCATCTCCGCTCCGGGTCGGGGGGCCCAGCGGCGGCCCAACAGTAGATGGGA
CGAGACCGGGCGATTCCCAAACCCGACCACCGCTTCCAAGACCGGTAAGAAGGAGCGACAGGGATACAAGTCCTGGC
GTGGACATAAAAACGCTATCATCTCCTGCTTGCATGAATGCGGGGGCAACATATCCTTCACCCGGCGATACCTGCTT
TTCCACCACGGTGTGAACTTCCCCCGCAATATCTTGCATTACTACCGTCACCTCCACAGCCCCTACTGCAGTCAGCA
AGTCCCGGCAACCCCGACAGAAAAAGACAGCAGCGACAACGGTGACCAGAAAACCAGCAGTTAGAAAATCCACAACA
AGTGCAGCAGGAGGAGGACTGAGGATCACAGCGAACGAGCCAGCGCAGACCAGAGAGCTGAGGAACCGGATCTTTCC
AACCCTCTATGCCATCTTCCAGCAGAGTCGGGGGCAAGAGCAGGAATTAAAAGTAAAAAACCGATCTCTGCGCTCGC
TCACCAGAAGTTGTTTGTATCACAAGAGCGAAGACCAACTTCAGCGCACTCTCGAGGACGCCGAGGCTCTCTTCAAC
AAGTACTGCGCGCTGACTCTTAAAGAGTAGCCCTTGCCCGCGCTCATTCGAAAACGGCGGGAATCACGTCACCCTTG
GCAGCTGTCCTTTGCCCTCGTCATGAGTAAAGAGATTCCCACGCCTTACATGTGGAGCTATCAGCCCCAAATGGGGT
TGGCAGCAGGTGCTTCCCAGGACTACTCCACCCGCATGAATTGGCTTAGCGCCGGGCCCTCAATGATATCACGGGTT
AATGATATACGAGCTTATCGAAACCAGTTACTCCTAGAACAGTCAGCTCTCACCACCACACCCCGCCAACACCTTAA
TCCCCGAAATTGGCCCGCCGCCCTGGTGTACCAGGAAAATCCCGCTCCCACCACCGTACTACTTCCTCGAGACGCCC
AGGCCGAAGTTCAGATGACTAACGCAGGTGTACAGCTGGCGGGCGGTTCCGCCCTATGTCGTCACCGACCTCAACAG
AGTATAAAACGCCTGGTGATCAGAGGCCGAGGTATCCAGCTCAACGACGAGTCGGTTAGCTCTTCGCTTGGTCTGCG
ACCAGACGGAGTCTTCCAGATCGCCGGCTGTGGGAGATCTTCCTTCACTCCTCGTCAGGCTGTGCTGACTTTGGAGA
GTTCGTCCTCGCAGCCCCGCTCGGGCGGCATCGGAACTCTCCAGTTTGTGGAGGAGTTTACTCCCTCTGTCTACTTC
AACCCCTTCTCCGGCTCTCCTGGCCAGTACCCGGACGAGTTCATACCGAACTTCGACGCAATCAGCGAGTCAGTGGA
TGGCTATGATTGATGTCTAATGGTGGCGCGGCTGAGCTAGCTCGACTGCGACACCTAGACCACTGCCGCCGCTTTCG
CTGTTTCGCCCGGGAACTCACCGAGTTCATCTACTTCGAACTCTCCGAGGAGCACCCTCAGGGTCCGGCCCACGGAG
TGCGGATTACCATCGAAGGGGGAATAGACTCTCGCCTGCATCGCATCTTCTCCCAGCGGCCCGTGCTGATTGAGCGC
GACCAGGGAAATACAACCATCTCCATCTACTGCATTTGTAACCACCCCGGATTGCATGAAAGCCTTTGCTGTCTTGT
TTGTGCTGAGTTTAATAAAAACTGAGTTAAGACCCTCCTACGGACTACCGCTTCTTCAATCAGGACTTTACAACACC
AACCAGATCTTCCAGAAGACCCAGACCCTTCCTCCTCTGATCCAGGACTCTAACTCTACCTTACCAGCACCCTCCAC
TACTAACCTTCCCGAAACTAACAAGCTTGGATCTCATCTGCAACACCGCCTTTCACGAAGCCTTCTTTCTGCCAATA
CTACCACTCCCAAAACCGGAGGTGAGCTCCGCGGTCTTCCTACTGACGACCCCTGGGTGGTAGCGGGTTTTGTAACG
TTAGGAGTAGTTGCGGGTGGGCTTGTGCTAATCCTTTGCTACCTATACACACCTTGCTGTGCATATTTAGTCATATT
GTGCTGTTGGTTTAAGAAATGGGGGCCATACTAGTCGTGCTTGCTTTACTTTCGCTTTTGGGTCTGGGCTCTGCTAA
TCTCAATCCTCTTGATCACGATCCATGTCTAGACTTCGACCCAGAAAACTGCACACTTACTTTTGCACCCGACACAA
GCCGTCTCTGTGGAGTTCTTATTAAGTGCGGATGGGACTGCAGGTCCGTTGAAATTACACATAATAACAAAACATGG
AACAATACCTTATCCACCACATGGGAGCCAGGAGTTCCCGAGTGGTATACTGTCTCTGTCCGAGGTCCTGACGGTTC
CATTCGCATTAGTAACAACACTTTCATTTTTTCTGAAATGTGCGATCTGGCCATGTTTATGAGCAAACAGTATGACC
TATGGCCTCCTAGCAAAGAGAACATTGTGGCATTTTCCATTGCTTATTGCTTGGTAACATGCATCATCACTGCTATC
ATTTGTGTGTGCATACACTTGCTTATAGTTATTCGCCCTAGACAAAGCAATGAGGAAAAAGAGAAAATGCCTTAACC
TTTTTCCTCATACCTTTTCTTTACAGCATGGCTTCTGTTACAGCTCTAATTATTGCCAGCATTGTCACTGTCGCTCA
CGGGCAAACAATTGTCCATATTACCTTAGGACATAATCACACTCTTGTAGGGCCCCCAATTACTTCAGAGGTTATTT
GGACCAAACTTGGAAGTGTTGATTATTTTGATATAATTTGCAACAAAACTAAACCAATATTTGTAATCTGCAACAGA
CAAAATCTCACGTTAATTAATGTCAGCAAAATTTATAACGGTTACTATTATGGTTATGATAGATCCAGTAGTCAATA
TAAAAATTACTTAGTTCGCATAACTCAACCCAAATCAACAGTGCCAACTATGACAATAATTAAAATGGCTAATAAAG
CATTAGAAAATTTTACATTACCAACAACGCCCAATGAAAAAAACATTCCAAATTCAATGATTGCAATTATTGCGGCG
GTGGCATTGGGAATGGCACTAATAATAATATGCATGTTCCTATATGCTTGTTGCTATAAAAAGTTTAAACATAAACA
GGATCCACTACTAAATTTTAACATTTAATTTTTTATACAGATGATTTCCACTACAATTTTTATCATTACTAGCCTTG
CAGCTGTAACTTATGGCCGTTCACACCTAACTGTACCTGTTGGCTCAACATGTACACTACAAGGACCCCAAGAAGGC
CATGTCACTTGGTGGAGAATATATGATAATGGAGGGTTCGCTAGACCATGTGATCAGCCTGGTACAAAATTTTCATG
CAACGGAAGAGACTTGACCATTATTAACATAACATTAAATGAGCAAGGCTTCTATTATGGAACCAACTATAAAAATA
GTTTAGATTACAACATTATTGTAGTGCCAGCCACCACTTCTGCTCCCCGCAAATCCACTTTCTCTAGCAGCAGTGCC
AAAGCAAGCACAATTCCTAAAACAGCTTCTGCTATGTTAAAGCTTCGAAAAATCGCTTTAAGTAATTCCACAGCCGC
TCCCAATACAATTCCTAAATCAACAATTGGCATCATTACTGCCGTGGTAGTGGGATTAATAATTATATTTTTGTGCA
TAATGTACTACGCCTGCTGCTATAGAAAACATGAACAAAAAGGTGATGCATTACTAAATTTTGATATTTAATTTTTT
ATAGAATTATGATATTGTTTCAATCAAATACCACTAACACTATCAATGTGCAGACTACTTTAAATCATGACATGGAA
AACCACACTACCTCCTATGCATACACAAACATTCAGCCTAAATACGCTATGCAACTAAGAAATCACCATACTAATTG
TAATTGGAATTCTTATACTATCTGTTATTCTTTATTTTATATTCTGCCGTCAAATACCCAATGTTCATAGAAATTCT
AAAAGACGACCCATCTATTCTCCTATGATTAGTCGTCCCCATATGGCTCTGAATGAAATCTAAGATCTTTTTTTTTC
TCTTACAGTATGGTGAACATCAATCATGATTCCTAGAAATTTCTTCTTCACCATACTCATCTGTGCTTTCAATGTCT
GTGCTACTTTCACAGCAGTAGCCACTGCAAGCCCAGACTGTATAGGACCATTTGCTTCCTATGCACTTTTTGCCTTC
GTTACTTGCATCTGCGTGTGTAGCATAGTCTGCCTGGTTATTAATTTTTTCCAACTGGTAGACTGGATCTTTGTGCG
AATTGCCTACCTACGTCACCATCCCGAATACCGCAATCAAAATGTTGCGGCACTTTTTAGGCTTATTTAAAACCATG
CAGGCTATGCTGCCAGTCATTTTAATTCTGCTCCTACCCTGCATTGCCCTAGCTTCCACCGCCACTCGCGCTACACC
TGAACAACTTAGAAAATGCAAATTTCAACAACCATGGTCATTTCTTGATTGCTACCATGAAAAATCTGATTTTCCCA
CATACTGGATAGTGATTGTTGGAATAATTAACATACTTTCATGTACCTTTTTCTCAATCACAATATACCCCACATTT
AATTTTGGGTGGAATTCTCCCAATGCACTGGGTTACCCACAAGAACCACATGAACATATCCCACTACAACACATACA
ACAACCACTAGCACTGGTAGAGTATGAAAATGAGCCACAACCTTCACTGCCTCCTGCCATTAGTTACTTCAACCTAA
CCGGCGGAGATGACTGAAATACTCACCACCTCCAATTCCGCCGAGGATCTGCTTGATATGGACGGCCGCGCCTCAGA
ACAGCGACTCGCCCAACTACGCATACGCCAGCAGCAGGAACGTGCCGCCAAGGAGCTCAGGGATGCTATTGAAATTC
ACCAATGCAAAAAAGGCATATTTTGTTTGGTAAAACAAGCCAAGATATCCTACGAGATTACCAATACTGACCATCGC
CTCTCATACGAGCTCGGACCGCAGCGACAAAAATTCACTTGTATGGTGGGAATCAACCCCATAATCATCACCCAGCA
AGCTGGAGATACCAAGGGTTGCATCCACTGTTCCTGCAGTTCCGCCGAGTGCATCTACACCCTGCTGAAGACCCTCT
GCGGCCTTCGAGACCTCCTACCCATGAACTAATCAACCCAGCCCCTCACTTACCAATTACATAAAGCCAATTAATAA
AAACACTTACTTGAAATCAGAAATAAGGTTTCTGTCTACGTTGTTTCCAAGCAGCACCTCACTTCCTTCTTCCCAAC
TCTGGTACTCTAAGCCTCGGCGGGTGGCATACTTCCTCCACACTTTGAAAGGGATGTCAAATTTTAGTTCCTCTTCT
TTGCCCACAATCTTCATTTCTTTATCCCCAGATGGCCAAACGAGCTCGGCTAAGCAGCTCCTTCAATCCGGTCTACC
CCTATGAAGATGAAAGCAGCTCACAACACCCCTTTATAAACCCTGGTTTCATTTCCTCAAATGGTTTTGCACAAAGC
CCAGATGGAGTTCTAACTCTTAAATGTGTTAATCCACTCACTACCGCCAGCGGACCCCTCCAACTTAAAGTTGGAAG
CAGTCTTACAGTAGATACTATCGATGGGTCTTTGGAGGAAAATATAACTGCCGCAGCGCCACTCACTAAAACTAACC
ACTCCATAGGTTTATTAATAGGATCTGGCTTGCAAACAAAGGATGATAAACTTTGTTTATCGCTGGGAGATGGGTTG
GTAACAAAGGATGATAAACTATGTTTATCGCTGGGAGATGGGTTAATAACAAAAAATGATGTACTATGTGCCAAACT
AGGACATGGCCTTGTGTTTGACTCTTCCAATGCTATCACCATAGAAAACAACACCTTGTGGACAGGCGCAAAACCAA
GCGCCAACTGTGTAATTAAAGAGGGAGAAGATTCCCCAGACTGTAAGCTCACTTTAGTTCTAGTGAAGAATGGAGGA
CTGATAAATGGATACATAACATTAATGGGAGCCTCAGAATATACTAACACCTTGTTTAAAAACAATCAAGTTACAAT
CGATGTAAACCTCGCATTTGATAATACTGGCCAAATTATTACTTACCTATCATCCCTTAAAAGTAACCTGAACTTTA
AAGACAACCAAAACATGGCTACTGGAACCATAACCAGTGCCAAAGGCTTCATGCCCAGCACCACCGCCTATCCATTT
ATAACATACGCCACTGAGACCCTAAATGAAGATTACATTTATGGAGAGTGTTACTACAAATCTACCAATGGAACTCT
CTTTCCACTAAAAGTTACTGTCACACTAAACAGACGTATGTTAGCTTCTGGAATGGCCTATGCTATGAATTTTTCAT
GGTCTCTAAATGCAGAGGAAGCCCCGGAAACTACCGAAGTCACTCTCATTACCTCCCCCTTCTTTTTTTCTTATATC
AGAGAAGATGACTGACAACAAAAAAAATAAAGATCAACTTTTTTATTGAAAATCAGTTTACAAGATTCGAGTAGTTA
TTTTGCCCCCCTCTTCCCATTTTATAGAATACACAATTCTCTCCCCACGCACAGCTTTGAACATTTGAATTCCATTA
GAGATAGACATAGTTTTAGATTCCACATTCCACACAGTTTCAGAGCGGGCCAATCTTGGATCAGTGATAGATATAAA
TCCATCGGAACAGTCTTTCAAGGTGGTTTCACAGTCCAACTGCTGCGGCTGCGGCTCCGGGGTTTGGATTAGGGTCA
TCTGGAAGAAGAACGATGGGAGTCATAATCCGAGAACGGGATCGGGCGGTTGTGTCTTAAACCTCGAAGCAATCGCT
GTCTGCGCCGCTCCGTGCGACTGCTGCTGATGGGATCAGGATCCACAGTCTCTCGAAGCATAATTTTAATAGCCCTC
AACATTAACATCCTGGTGCGATGGGCACAACAACGCATTCTAATTTCGCTTAGCTCACTGCAGTAGGTACAACACAT
TACCACAATGTTGTTTAACAGGCCATAATTAAAGGTGCTCCAGCCAAAACTCATCTCAGGGATAATCATACCCGCGT
GACCATCGTACCAAATCTTAATGTAAATTAGATGACGCCCCCTCCAGAACACACTGCCCACATACATAATTTCCTTG
GGCATATGCATGTTCACAATTTCTCTGTACCATGGACAGCGCTGGTTAATCATACAGCCCCTAATAACCTTCCGGAA
CCACATAGCTAGCACTGCTCCCCCAGCAATACATTGAAGAGAACCCGGCTGTTTACAGTGACAATGGAGAACCCACT
TCTCTCGCCCATGGATCACTTGAGAATTAAATATATCTATAGTGGCACAACACAAACATAAATGCATGCATCTTTTC
ATAACCCTCAACTCTTCGGGGGTTAAAAACATATCCCAGGGAATAGGAAGCTCTTGCAAAACAGTAAAGCTGGCAGA
ACAAGGAAGACCACGAACACAACTTACACTATGCATAGTCATAGTATCACAATCTGGCAACAGCGGGTGGTCTTCAG
TCATAGAAGCTCGGGTTTCATTTTCCTCACATCGTGGTAACTGGGCTCTGGTGTAAGGGTGATGTCTGGCGCATGAT
GTCGAGCGTGCGCGCAACCTTGTCATAATGGAGTTGCTTCCTGACATTCTCGTATTTTGTATAGCAAAATGCGGCCC
TGGCACAACACACTTTTCTTCGTCTTCTATCCTGCCGCTTAGTGTGTTCCGTCTGATAATTCAAGTACAGCCACACT
CTTAAGTTGGTCAAAAGAATGCTGGCTTCAGTTGTAATCAAAACTCCATCATATTTAATTGTTCTAAGGAAATCATC
CACGGTAGCATATGCAAATCCCAACCAAGCAATGCAACTGGATTGCGTTTCAAGCAGCAGAGGAGAGGGAAGAGACG
GAAGAATCATGTTAATTTTTATTCCAAACGATCTCGCAGTACTTCAAATTGTAGATCGCGCAGATGGCATCTATCGC
CCCCACTGTGTTGGTGAAAAAGCACAGCTAAATCAAAAGAAATGCGATTTTCAAGGTGCTCAACGGTGGCTTCCAAC
AAAGCCTCCACGCGCACATCCAAAAACAAAAGAATACCAAAAGAAGGAGCATTTTCTAACTCCTCAAACATCATATT
ACATTCCTGCACCATTCCCAGATAATTTTCAGCTTTCCAGCCTTGAATTATTCGTGTCAGTTCTTGTGGTAAATCCA
AACCACACATTACAAACAGGTCCCGGAGGGCGCCCTCCACCACCATTCTTAAACACACCCTCATAATGACAAAATAT
CTTGCTCCTGTGTCACCTGTAGCAAATTAAGAATGGCATCATCAATTGACATGCCCTTGGCTCTAAGTTCTTCTCTA
AGTTCTAGTTGTAAATACTCTCTCATATTATCACCAAACTGCTTAGCCAGAAGCCCCCCGGGAACAATAGCAGGGGA
CGCTACAGTGCAGTACAAGCGCAGACCTCCCCAATTGGCTCCAGCAAAAACAAGATTAGAATAAGCATACTGGGAAC
CACCAGTAATATCATCAAAGTTGCTGGAAATATAATCAGGCAGAGTTTCTTGTAAAAATTGAATAAAAGAAAAATTT
TCCAAAGAAACATTCAAAACCTCTGGGATGCAAATGCAATAGGTTACCGCGCTGCGCTCCAACATTGTTAGTTTTGA
ATTAGTCTGTAAAATAAAAGAAACAAGCGTCATATCATAGTAGCCTGTCGAACAGGTGGATAAATCAGTCTTTCCAT
CACAAGACAAGCCACAGGGTCTCCAGCTTGACCCTCGTAAAACCTGTCATCGTGATTAAACAACAGCACCGAAAGTT
CCTCGCGGTGGCCAGCATGAATAATTCTTGATGAAGCATATAATCCAGACATGTTAGCATCAGTTAAAGAGAAAAAA
CAGCCAACATAGCCTCTGGGTATAATTATGCTTAATCTTAAGTATAGCAAAGCCACCCCTCGCGGATACAAAGTAAA
AGGCACAGGAGAATAAAAAATATAATTATTTCTCTGCTGCTGTTCAGGCAACGTCGCCCCCGGTCCCTCTAAATACA
CATACAAAGCCTCATCAGCCATGGCTTACCAGACAAAGTACAGCGGGCGCACAAAGCACAAGCTCTAAAGAAGCTCT
AAAGACACTCTCCAACCTCTCCACAATATATACACAAGCCCTAAACTGACGTAATGGGAGTAAAGTGTAAAAAATCC
CGCCAAGCCCAACACACACCCCGAAACTGCGTCAGCAGGGAAAAGTACAGTTTCACTTCCGCAAACCCAACAAGCGT
AACTTCCTCTTTCTCACGGTACGTCACATCCGATTAACTTGCAACGTCATTTTCCCACGGCCGCACCGCCCCTTTTA
GCCGTTCACCCCGCAGCCAATCACCACACAGCGCGCACTTTTTTAAATTACCTCATTTACATGTTGGCACCATTCCA
TCTATAAGGTATATTATTGATAATG

GenBank Accession No. AAW33461 (SEQ ID NO: 226)

MAKRARLSSSFNPVYPYEDESSSQHPFINPGFISSNGFAQSPDGVLTLKCVNPLTTASGPLQLKVGSSLTVDTIDGS
LEENITAAAPLTKINHSIGLLIGSGLQTKDDKLCLSLGDGLVTKDDKLCLSLGDGLITKNDVLCAKLGHGLVFDSSN
AITIENNTLWTGAKPSANCVIKEGEDSPDCKLTLVLVKNGGLINGYITLMGASEYTNTLFKNNQVTIDVNLAFDNTG
QIITYLSSLKSNLNFKDNONMATGTITSAKGFMPSTTAYPFITYATETLNEDYIYGECYYKSTNGTLFPLKVTVTLN
RRMLASGMAYAMNFSWSLNAEEAPETTEVTLITSPFFFSYIREDD

GenBank Accession No. AAW33439 (SEQ ID NO: 227)

MRRRAVLGGAVVYPEGPPPSYESVMQQQAAMIQPPLEAPFVPPRYLAPTEGRNSIRYSELSPQYDTTKLYLVDNKSA
DIASLNYQNDHSNFLTTVVONNDFTPTEASTQTINFDERSRWGGQLKTIMHTNMPNVNEYMFSNKFKARVMVSRKAP
EGVTVNDHKDDILKYEWFEFTLPEGNFSATMTIDLMNNAIIDNYLKIGRONGVLESDIGVKFDTRNFRLGWDPETKL
IMPGVYTYEAFHPDIVLLPGCGVDFTESRLSNLLGIRKRHPFQEGFKIMYEDLEGGNIPALLDVTAYEESKKDITTE
TGEKAVVKTTTVAVAEETSEDDNITRGDTYITEKQKREAAAAELLLMSEVKKELKIQPLEKDSKNRSYNVLEDKINT
AYRSWYLSYNYGNPEKGIRSWTLLTTSDVTCGAEQVYWSLPDMMQDPITFRSSRQVNNYPVVGAELMPVFSKSFYNE
QAVYSQQLRQSTSLTHVENRFPENQILIRPPAPTITTISENVPALTDHGTLPLRSSIRGVQRVTVTDARRRTCPYVY
KALGIVAPRVLSSRTF

GenBank Accession No. AAW33444 (SEQ ID NO: 228)

MATPSMMPQWAYMHIAGQDASEYLSPGLVQFARATDTYFSMGNKFRNPTVAPTHDVTTDRSQRLMLRFVPVDREDNT
YSYKVRYTLAVGDNRVLDMASTFFDIRGVLDRGPSFKPYSGTAYNSLAPKGAPNTCQWKDSDSKMHTFGVAAMPGVT
GKKIEADGLPIGIDSTSGTDTVIYADKTFQPEPQVGNASWVDANGTEEKYGGRALKDTTKMKPCYGSFAKPINKEGG
QANLKDSETAATTPNYDIDLAFFDNKNIAANYDPDIVMYTENVDLQTPDTHIVYKPGTEDISSESNLGQQAMPNRPN
YIGFRDNFIGLMYYNSTGNMGVLAGQASQLNAVVDLQDRNTELSYQLLLDSLGDRTRYFSMWNQAVDSYDPDVRIIE
NHGVEDELPNYCFPLNGVGFTDTYQGVKVKTDAVAGTSGTQWDKDDTTVSTANEIHGGNPFAMEINIQANLWRSFLY
SNVALYLPDSYKYTPSNVTLPENKNTYDYMNGRVVPPSLVDTYVNIGARWSLDAMDNVNPFNHHRNAGLRYRSMLLG
NGRYVPFHIQVPQKFFAVKNLLLLPGSYTYEWNFRKDVNMVLQSSLGNDLRVDGASISFTSINLYATFFPMAHNTAS
TLEAMLRNDTNDQSFNDYLSAANMLYPIPANATNIPISIPSRNWAAFRGWSFTRLKTKETPSLGSGFDPYFVYSGSI
PYLDGTFYLNHTFKKVSIMFDSSVSWPGNDRLLSPNEFEIKRTVDGEGYNVAQCNMTKDWFLVQMLANYNIGYQGFY
IPEGYKDRMYSFFRNFQPMSRQVVDEVNYTDYKAVTLPYQHNNSGFVGYLAPTMRQGEPYPANYPYPLIGTTAVKSV
TQKKFLCDRTMWRIPFSSNFMSMGALTDLGQNLLYANSAHALDMTFEVDPMDEPTLLYLLFEVFDVVRVHQPHRGVI
EAVYLRTPFSAGNATT

GenBank Accession No. AY601633 (SEQ ID NO: 204)

CTATCTATATAATATACCTTATAGATGGAATGGTGCCAATATGCAAATGAGGTAATTTAAAAAAGTGCGCGCTGTGT
GGTGATTGGCTGCGGGGTGAACGGCTAAAAGGGGCGGGCAATGCTGGGAGGTGACGTAACTTATGTAGGAGGAGTTA
TGTTGCAAGTTATCGCGGTAAAGGTGACGTAAAACGAGGTGTGGTTTGGACACGGAAGTAGACAGTTTTCCCACGCT
TACTGACAGGATATGAGGTAGTTTTGGGCGGATGCAAGTGAAAATTCTCCATTTTCGCGCGAAAACTGAATGAGGAA
GTGAATTTCTGAGTCATTTCGCGGTTATGACAGGGTGGAGTATTTGCCGAGGGCCGAGTAGACTTTGACCGTTTACG
TGGAGGTTTCGATTACCGTGTTTTTCACCTAAATTTCCGCGTACGGTGTCAAAGTCCTGTGTTTTTACGTAGGTGTC
AGCTGATCACTAGGGTATTTAAACCTGTCGAGTTCCGTCAAGAGGCCACTCTTGAGTGCCAGCGAGAAGAGTTTTCT
CCTCCGCGCTGCGAGTCAGTTTTGCGCTTTGAAAATGAGACACCTGCGATTCCTGCCACAGGAGATTATCTCCAGCG
AGACCGGGATCGAAATACTGGAGTTTGTGGTAAATACCCTGATGGGAGATGACCCGGAACCGCCAGTGCAGCCTTTC
GATCCACCTACGCTGCACGATCTGTATGATTTAGAGGTAGACGGGCCTGATGATCCCAATGAGGAAGCTGTAAATGG
GTTTTTTACTGATTCTATGCTGCTAGCTGCCGATGAAGGATTGGACATAAACCCTCCTCCTGGGACCCTTGATACCC
CAGGGGTGGTTGTGGAAAGCGGCAGAGGTGGGAAAAAATTGCCTGATCTGGGAGCAGCTGAAATGGACTTGCGTTGT
TATGAAGAGGGTTTTCCTCCGAGTGATGATGAAGATGGGGAAACTGAACAGTCCATCCATACCGCAGTGAATGAGGG
AGTAAAAGCTGCCAGCGATGTTTTTAAGTTGGACTGTCCGGAGCTGCCTGGACATGGCTGTAAGTCTTGTGAATTTC
ACAGGAATAACACTGGAATGAAAGAACTATTGTGCTCGCTTTGCTATATGAGAATGCACTGCCACTTTATTTACAGT
AAGTGTATTTAAGTGAAATTTAAAGGAATAGTGTAGCTGTTTAATAACTGTTGAATGGTAGATTTATGTTTTTACTT
GCGATTTTTTGTAGGTCCTGTGTCTGATGATGAGGCGCCTTCTCCTGATTCAACTACCTCACCTCCTGAAATTCAGG
CGCCCGTACCTGCAAACGTATGCAAGCCCATTCCTGTGAAGCCTAAGTGTGGGAAACGCCCTGCTGTGGATAAGCTT
GAGGACTTGTTGGAGGGTGGGGATGGACCTTTGGACCTTAGTACCCGGAAACTGCCAAGACAATGAGTGCCCTGCAG
CTGTGTTTATTTAATGTGACGTCATGTAATAAAATTATGTCAGCTGCTGAGTGTTTTATTGCTTCTTGGGTGGGGAC
TTGGATATATAAGTAGGAGCAGATCTGTGTGGTTAGCTCATAGCAACCTGCTGCCATCCATGGAGGTTTGGGCTATC
TTGGAAGACCTGAGACAGACTAGGCTACTGCTAGAAAACGCCTCGGACGGAGTCTCTGGCTTTTGGAGATTCTGGTT
CGGTGGTGATCTAGCTAGGCTAGTGTTTAGGATAAAACAGGACTACAGGGAAGAATTTGAAAAGTTATTGGACGACA
GTCCAGGACTTTTTGAAGCTCTTAACTTGGGCCACCAGGCTCATTTTAAGGAGAAGGTTTTATCAGTTTTAGATTTT
TCTACTCCTGGTAGAACTGCTGCTGCTGTAGCTTTTCTTACTTTTATATTGGATAAATGGATCCGCCAAACCCACTT
CAGCAAGGGATACGTTTTGGATTTCATAGCAGCAGCTTTGTGGAGAACATGGAAGGCTCGCAGGATGAGGACAATCT
TAGATTACTGGCCAGTGCAGCCTCTGGGAGTAGCAGGGATACTGAGACACCCACCGGCCATGCCAGCGGTTCTGGAG
GAGGAGCAGCAGGAGGACAATCCGAGAGCCGGCCTGGACCCTCCGGTGGAGGAGTAGCTGACCTGTTTCCTGAACTG
CGACGGGTGCTTACTAGGTCTACGTCCAGTGGACAGGACAGGGGCATTAAGAGGGAGAGGAATCCTAGTGGGAATAA
TTCAAGAACCGAGTTGGCTTTAAGTTTAATGAGCCGTAGGCGTCCTGAAACTGTTTGGTGGCATGAGGTTCAGAGCG
AAGGCAGGGATGAAGTTTCAATATTGCAGGAGAAATATTCACTAGAACAACTTAAGACCTGTTGGTTGGAACCTGAG
GATGATTGGGAGGTGGCCATTAGGAATTATGCTAAGATATCTCTGAGGCCTGATAAACAGTATAGAATTACTAAGAA
GATTAATATTAGAAATGCATGCTACATATCAGGGAATGGGGCAGAGGTTATAATAGATACCCAAGATAAAGCAGCTT
TTAGATGTTGTATGATGGGTATGTGGCCAGGGGTTGTCGGCATGGAAGCAGTAACATTTATGAATATTAGGTTTAAA
GGGGATGGGTATAATGGCATTGTATTTATGGCTAACACTAAGCTGATTCTACATGGTTGTAGCTTTTTTGGGTTTAA
TAATACTTGTGTAGAAGCTTGGGGGCAAGTTGGTGTGAGGGGTTGTAGTTTTTATGCATGCTGGATTGCAACATCAG
GTAGGGTCAAGAGTCAGTTGTCTGTGAAGAAATGCATGTTTGAGAGATGTAATCTTGGCATACTGAATGAAGGTGAA
GCAAGGGTCCGCCACTGCGCAGCTACAGAAACTGGCTGCTTCATTCTAATAAAGGGAAATGCCAGTGTGAAGCATAA
TATGATCTGTGGACATTCGAATGAGAGGCCTTATCAGATGCTGACCTGCGCTGGTGGACATTGCAATATTCTTGCTA
CCGTGCATATCGTTTCCCATGCACGCAAGAAATGGCCTGTATTTGAACATAATGTGATTACCAAGTGCACCATGCAC
ATAGGTGGTCGCAGGGGAATGTTTATGCCTTACCAGTGTAACATGAATCATGTGAAGGTGATGTTGGAACCAGATGC
CTTTTCCAGAGTGAGCTTAACAGGAATCTTTGATATGAATATTCAACTATGGAAGATCCTGAGATATGATGACACTA
AACCGAGGGTGCGCGCATGCGAATGCGGAGGCAAGCATGCTAGATTCCAGCCGGTGTGCGTGGATGTGACTGAAGAC
CTGAGACCCGATCATTTGGTGCTTGCCTGCACTGGAGCGGAGTTCGGTTCTAGTGGTGAAGAAACTGACTAAAGTGA
GTAGTGGGGCAATATGTGGATGGGGACTTTCAGGTTGGTAAGGTGGACAGATTGGGTAAATTTTGTTAATTTCTGTC
TTGCAGCTGCCATGAGTGGAAGCGCTTCTTTTGAGGGGGGAGTATTTAGCCCTTATCTGACGGGCAGGCTCCCATCA
TGGGCAGGAGTTCGTCAGAATGTCATGGGATCCACTGTGGATGGGAGACCCGTCCAGCCCGCCAATTCCTCAACGCT
GACCTATGCCACTTTGAGTTCGTCATCATTGGATGCAGCTGCAGCCGCCGCCGCTACTGCTGCCGCCAACACCATCC
TTGGAATGGGCTATTACGGAAGCATCGTTGCCAATTCCAGTTCCTCTAATAACCCTTCAACCCTGGCTGAGGACAAG
CTGCTTGTTCTCTTGGCTCAGCTCGAGGCCTTAACCCAACGCTTAGGCGAACTGTCTAAGCAGGTGGCCCAGTTGCG
TGAGCAAACTGAGTCTGCTGTTGCCACAGCAAAGTCTAAATAAAGATCTCAAATCAATAAATAAAGAAATACTTGTT
ATAAAAACAAATGAATGTTTATTTGATTTTTCGCGCGCGGTATGCCCTGGACCATCGGTCTCGATCATTGAGAACTC
GGTGGATCTTTTCCAGTACCCTGTAAAGGTGGGATTGAATGTTTAGATACATGGGCATTAGTCCGTCTCGGGGGTGG
AGATAGCTCCATTGAAGAGCCTCTTGCTCCGGGGTAGTGTTATAAATCACCCAGTCATAGCAAGGTCGGAGTGCATG
GTGTTGCACAATATCTTTTAGGAGCAGACTAATTGCAACGGGGAGGCCCTTAGTGTAGGTGTTTACAAATCTGTTGA
GCTGGGACGGGTGCATCCTGGGTGAAATTATATGCATTTTGGACTGGATCTTGAGGTTGGCAATGTTGCCGCCTAGA
TCCCGTCTCGGATTCATATTGTGCAGAACCACCAAGACAGTGTATCCGGTGCACTTGGGAAATTTATCATGCAGCTT
AGAGGGAAAAGCATGAAAAAATTTGGAGACGCCTTTGTGACCCCCCAGATTCTCCATGCACTCATCCATAATGATAG
CGATGGGGCCGTGGGCAGCGGCACGGGCGAACACGTTCCGGGGGTCTGAAACATCATAGTTATGCTCCTGAGTCAGG
TCATCATAAGCCATTTTAATAAACTTTGGGCGGAGGGTGCCAGATTGGGGGATGAAAGTTCCCTCTGGCCCGGGAGC
ATAGTTTCCCTCACATATTTGCATTTCCCAGGCTTTCAGTTCCGAGGGGGGGATCATGTCCACCTGCGGGGCTATAA
AAAATACCGTTTCTGGAGCCGGGGTGATTAACTGGGATGAGAGCAAATTCCTAAGCAGCTGAGACTTGCCGCACCCA
GTGGGACCGTAAATGACCCCAATTACGGGTTGCAGATGGTAGTTTAGGGAGCGACAGCTGCCGTCCTCCCGGAGCAG
GGGGGCCACTTCGTTCATCATTTCCCTTACATGGATATTTTCCCGCACCAAGTCCGTTAGGAGGCGCTCTCCCCCAA
GGGATAGAAGCTCCTGGAGCGAGGAGAAGTTTTTCAGCGGCTTCAGCCCGTCAGCCATGGGCATTTTGGAAAGAGTC
TGTTGCAAGAGCTCGAGCCGGTCCCAGAGCTCGGTGATGTGCTCTATGGCATCTCGATCCAACAGACCTCCTCGTTT
CGCGGGTTGGGACGGCTCCTGGAGTAGGGAATCAGACGATGGGCGTCCAGCGCTGCTAGGGTCCGATCCTTCCATGG
TCGCAGCGTCCGAGTCAGGGTTGTTTCCGTCACGGTGAAGGGGTGCGCGCCTGGTTGGGCGCTTGCGAGGGTGCGCT
TCAGACTCATCCTGCTGGTCGAGAACCGCTGCCGATCGGCGCCCTGCAGGTCGGCCAGGTAGCAGTTTACCATGAGT
TCGTAGTTGAGCGCCTCGGCCGCGTGGCCTTTGGCACGGAGCTTACCTTTGGAAGTTTTATGGCAGGCGGGGCAGTA
GATACATTTGAGGGCATACAGCTTGGGCGCGAGGAAAATGGATTCGGGGGAGTATGCATCCGCACCGCAGGAGGCGC
AGACGGTTTCGCACTCCACGAGCCAGGTCAGATCCGGCTCATCGGGGTCAAAAACAAGTTTTCCGCCATGTTTTTTG
ATGCGTTTCTTACCTTTGGTTTCCATGAGTTCGTGTCCCCGCTGGGTGACAAAGAGGCTGTCCGTGTCCCCGTAGAC
CGACTTTATGGGCCTGTCCTCGAGCGGAGTGCCTCGGTCCTCTTCGTAGAGGAACCCAGCCCACTCTGATACAAAAG
CGCGTGTCCAGGCCAGCACAAAGGAGGCCACGTGGGAGGGGTAGCGGTCGTTGTCAACCAGTGGGTCCACCTTCTCT
ACGGTATGTAAACACATGTCCCCCTCCTCCACATCCAAGAATGTGATTGGCTTGTAAGTGTAGGCCACGTGACCAGG
GGTCCCCGCCGGGGGGGTATAAAAGGGGGCGGGCCTCTGTTCGTCCTCACTGTCTTCAGGATCGCTGTCCAGGAGCG
CCAGCTGTTGGGGTAGGTATTCCCTCTCGAAGGCGGGCATGACCTCTGCACTCAGGTTGTCAGTTTCTAGGAACGAG
GAGGATTTGATATTGACAGTACCAGCAGAGACGCCTTTCATAAGACTCTCGTCCATCTGGTCAGAAAACACAATCTT
CTTGTTGTCCAGCTTGGTGGCAAATGATCCATAAAGGGCATTGGACAGAAGCTTGGCGATGGAGCGCATGGTTTGGT
TCTTTTCCTTGTCCGCGCGCTCCTTGGCGGCGATGTTAAGCTGGACGTACTCGCGCGCCACACATTTCCATTCAGGG
AAGATGGTTGTCAGTTCATCCGGAACTATTCTGACTCGCCATCCCCTATTGTGCAGGGTTATCAGATCCACACTGGT
GGCCACCTCGCCTCGGAGGGGCTCATTGGTCCAGCAGAGTCGACCTCCTTTTCTTGAACAGAAAGGTGGGAGGGGGT
CTAGCATGAACTCATCAGGGGGGTCCGCATCTATGGTAAATATTCCCGGTAGCAAATCTTTGTCAAAATAGCTGATG
GTGGCGGGATCATCCAAGGTCATCTGCCATTCTCGAACTGCCAGCGCGCGCTCATAGGGGTTAAGAGGGGTGCCCCA
GGGCATGGGGTGGGTGAGCGCGGAGGCATACATGCCACAGATATCGTAGACATAGAGGGGCTCTTCGAGGATGCCGA
TGTAAGTGGGATAACAGCGCCCCCCTCTGATGCTTGCTCGCACATAGTCATAGAGTTCATGTGAGGGGGCGAGAAGA
CCCGGGCCCAGATTGGTGCGGTTGGGTTTTTCCGCCCTGTAAACGATCTGGCGAAAGATGGCATGGGAATTGGAAGA
GATAGTAGGTCTCTGGAATATGTTAAAATGGGCATGAGGTAGGCCTACAGAGTCCCTTATGAAGTGGGCATATGACT
CTTGCAGCTTGGCTACCAGCTCGGCGGTGACGAGTACATCCAGGGCACAGTAGTCGAGAGTTTCCTGGATGATGTCA
TAACGCGGTTGGCTTTTCTTTTCCCACAGCTCGCGGTTGAGAAGGTATTCTTCGCGATCCTTCCAGTACTCTTCGAG
GGGAAACCCGTCTTTTTCTGCACGGTAAGAGCCCAACATGTAGAACTGATTGACTGCCTTGTAGGGACAGCATCCCT
TCTCCACTGGAAGAGAGTATGCTTGGGCTGCATTGCGCAGCGAGGTATGAGTGAGGGCAAAAGTGTCCCTGACCATG
ACTTTGAGGAATTGATACTTGAAGTCAATGTCATCACAGGCCCCCTGTTCCCAGAGTTGGAAGTCCACCCGCTTCTT
GTAGGCGGGGTTGGGCAAAGCGAAAGTAACATCATTGAAGAGGATCTTGCCGGCCCTGGGCATGAAATTTCGGGTGA
TTTTGAAAGGCTGAGGGACCTCTGCTCGGTTATTGATAACCTGAGCGGCCAAGACGATCTCATCAAAGCCATTGATG
TTGTGCCCCACTATGTACAGTTCTAAGAATCGAGGGGTGCCCCTGACATGAGGCAGCTTCTTGAGTTCTTCAAAAGT
GAGATCTGTAGGGTCAGTGAGAGCATAGTGTTCGAGGGCCCATTCGTGCACGTGAGGGTTCGCTTTGAGGAAGGAGG
ACCAGAGGTCCACTGCCAGTGCTGTTTGTAACTGGTCCCGGTACTGACGAAAATGCTGCCCGACTGCCATCTTTTCT
GGGGTGACGCAATAGAAGGTTTGGGGGTCCTGCCGCCAGCGATCCCACTTGAGTTTCATGGCGAGGTCATAGGCGAT
GTTGACGAGCCGCTGGTCTCCAGAGAGTTTCATGACCAGCATGAAGGGGATTAGCTGCTTGCCAAAGGACCCCATCC
AGGTGTAGGTTTCCACATCGTAGGTGAGGAAGAGCCTTTCTGTGCGAGGATGAGAGCCAATCGGGAAGAACTGGATC
TCCTGCCACCAGTTGGAGGAATGGCTGTTGATGTGATGGAAGTAGAACTCCCTGCGACGCGCCGAGCATTCATGCTT
GTGCTTGTACAGACGGCCGCAGTACTCGCAGCGATTCACGGGATGCACCTCATGAATGAGTTGTACCTGACTTCCTT
TGACGAGAAATTTCAGTGGAAAATTGAGGCCTGGCGTTTGTACCTCGCGCTCTACTATGTTGTCTGCATCGGCATGA
CCATCTTCTGTCTCGATGGTGGTCATGCTGACGAGCCCTCGCGGGAGGCAAGTCCAGACCTCGGCGCGGCAGGGGCG
GAGCTCGAGGACGAGAGCGCGCAGGCCGGAGCTGTCCAGGGTCCTGAGACGCTGCGGAGTCAGGTTAGTAGGCAGTG
TCAGGAGATTGACTTGCATGATCTTTTCGAGGGCGTGAGGGAGGTTCAGATGGTACTTGATCTCCACGGGTCCGTTG
GTGGAGATGTCGATGGCTTGCAGGGTTCCGTGCCCCTTGGGTGCTACCACCGTGCCCTTGTTTTTCCTTTTGGGCGG
CGGTGGCTCTGTTGCTTCTTGCATGTTTAGAAGCGGTGTCGAGGGCGCGCACCGGGCGGCAGGGGCGGTTCGGGACC
CGGCGGCATGGCTGGCAGTGGTACGTCGGCGCCGCGCGCGGGTAGGTTCTGGTACTGTGCTCTGAGAAGACTCGCAT
GCGCGACGACGCGGCGGTTGACATCCTGGATCTGACGCCTCTGGGTGAAAGCTACCGGCCCCGTGAGCTTGAACCTG
AAAGAGAGTTCAACAGAATCAATCTCGGTATCGTTGACGGCGGCTTGCCTAAGGATTTCTTGCACGTCGCCAGAGTT
GTCCTGGTAGGCGATCTCGGCCATGAACTGCTCGATCTCTTCCTCTTGAAGATCTCCGCGGCCCGCTCTCTCGACGG
TGGCCGCCAGGTCGTTGGAGATGCGCCCAATGAGTTGAGAGAATGCATTCATGCCCGCCTCGTTCCAGACGCGGCTG
TAGACCACAGCCCCCACGGGATCTCTCGCGCGCATGACCACCTGGGCGAGGTTGAGCTCCACGTGGCGGGTGAAGAC
CGCATAGTTGCATAGACGCTGGAAAAGGTAGTTGAGTGTGGTGGCGATGTGCTCGGTGACGAAGAAATACATGATCC
ATCGTCTCAGCGGCATCTCGCTGACATCGCCCAGCGCTTCCAAGCGCTCCATGGCCTCGTAGAAGTCCACGGCAAAG
TTGAAAAACTGGGAGTTACGCGCGGACACGGTCAACTCCTCTTCCAGAAGACGGATGAGTTCGGCGACGGTGGTGCG
CACCTCGCGCTCGAAAGCCCCTGGGATTTCTTCCTCAATCTCTTCTTCTTCCACTAACATCTCTTCCTCTTCAGGTG
GGGCTGCAGGAGGAGGGGGAACGCGGCGACGCCGGCGGCGCACGGGCAGACGGTCGATGAATCTTTCAATGACCTCT
CCGCGGCGGCGGCGCATGGTCTCGGTGACGGCACGACCGTTCTCCCTGGGTCTCAGAGTGAAGACGCCTCCGCGCAT
CTCCCTGAAGTGGTGACTGGGAGGCTCTCCGTTGGGCAGGGACACCGCGCTGATTATGCATTTTATCAATTGCCCCG
TAGGTACTCCGCGCAAGGACCTGATCGTCTCAAGATCCACGGGATCTGAAAACCTTTCGACGAAAGCGTCTAACCAG
TCGCAATCGCAAGGTAGGCTGAGCACTGTTTCTTGCGGGGGGGGGGGGCTAGACGCTCGGTCGGGGTTCTCTCTTTC
TTCTCCTTCCTCCTCTTTGGAGGGTGAGACGATGCTGCTGGTGATGAAATTAAAATAGGCAGTTTTGAGACGGCGGA
TGGTGGCGAGGAGCACCAGGTCTTTGGGTCCGGCTTGTTGGATGCGCAGGCGATGGGCCATTCCCCAAGCATTATCC
TGACATCTGGCCAGATCTTTATAGTAGTCTTGCATGAGTCGTTCCACGGGCACTTCTTCTTCGCCCGCTCTGCCATG
CATGCGAGTGATCCCGAACCCGCGCATGGGCTGGACAAGTGCCAGGTCCGCTACAACCCTTTCTGCGAGGATGGCTT
GCTGCACCTGGGTGAGGGTGGCTTGGAAGTCGTCAAAGTCCACGAAGCGGTGGTAAGCCCCGGTGTTGATTGTGTAG
GAGCAGTTGGCCATGACTGACCAGTTGACTGTCTGGTGCCCCGGACGCACAATCTCGGTGTACTTGAGGCGCGAGTA
GGCGCGGGTGTCAAAGATGTAATCGTTACAGGTGCGCACCAGGTACTGGTAGCCGATAAGAAAGTGCGGCGGCGGCT
GGCGGTATAGGGGCCATCGCTCTGTAGCCGGGGCGCCAGGGGCGAGGTCTTCCAGCATGAGGCGGTGATAACCGTAG
ATGTACCTGGACATCCAGGTGATACCGGAGGCGGTGGTGGATGCCCGCGGGAACTCGCGTACGCGGTTCCAGATGTT
GCGCAGCGGCATGAAGTAGTTCATGGTAGGCACGGTTTGGCCCGTGAGACGTGCACAGTCGTTGATGCTCTAGACAT
ACGGGCAAAAACGAAAGCGGTCAGCGGCTCGTCTCCGTGGCCTGGAGGCTAAGCGAACGGGTTGGGCTGCGCGTGTA
CCCCGGTTCGAATCTCGGATCAGGCTGGAGCCGCAGCTAACGTGGTACTGGCACTCCCGTCTCGACCCAGGCCTGCA
CAAAACCTCCAGGATACGGAGGCGGGTCGTTTTTTTTTTTTTTTGCTTTTTCCTGGATGGGAGCCAGTGCTGCGTCA
AGCTTTAGAACACTCAGTTCTCGGGGCTGGGAGTGGCTCGCGCCCGTAGTCTGGAGAATCAATCGCCAGGGTTGCGT
TGCGGTGTGCCCCGGTTCGAGTCTTAGCGCGCCGGATCGGCCGGTTTCCGCGACAAGCGAGGGTTTGGCAGCCCCGT
CATTTCTAAGACCCCGCCAGCCGACTTCTCCAGTTTACGGGAGCGAGCCCTCTTTTTTTGTTTTTTTGTTGCCCAGA
TGCATCCCGTGCTGCGACAGATGCGCCCCCAGCAACAGCCCCCTTCTCAGCAGCAGCTACAACAACAGCCACAAAAG
GCTCTTCCTGCTCCTGTAACTACTGCGGCTGCAGCCGTCAGCGGCGCGGGGCAGCCCGCCTATGATCTGGACTTGGA
AGAGGGCGAGGGACTGGCGCGCCTGGGCGCACCATCGCCCGAGCGGCACCCGCGGGTGCAACTGAAAAAGGACTCTC
GCGAGGCGTACGTGCCCCAGCAGAACCTGTTCAGGGACAGGAGCGGCGAGGAGCCTGAGGAAATGCGAGCTTCCCGC
TTTAACGCGGGTCGCGAACTGCGTCACGGTCTGGACCGAAGACGGGTGCTGCGTGATGATGATTTTGAAGTCGATGA
AGTGACAGGAATAAGTCCTGCTAGGGCACATGTGGCCGCGGCCAACCTAGTATCAGCTTACGAGCAGACCGTGAAGG
AGGAGCGCAACTTTCAAAAATCTTTCAACAACCATGTGCGCACCCTGATTGCCCGCGAGGAAGTGACACTGGGACTG
ATGCACCTGTGGGACCTGATGGAAGCCATTACCCAGAACCCCACCAGCAAACCTCTAACCGCTCAGCTGTTTCTGGT
GGTGCAACATAGTAGAGACAATGAGGCATTTAGGGAGGCGCTGTTGAACATTACTGAGCCCGAGGGGAGATGGTTGT
ATGATCTTATCAATATTCTGCAAAGTATAATAGTGCAAGAACGTAGCCTGGGTCTAGCTGAGAAGGTGGCTGCTATT
AACTACTCGGTCTTGAGCCTGGGCAAGCACTACGCTCGCAAGATCTACAAAACCCCATACGTACCTATAGACAAGGA
GGTGAAGATAGATGGGTTTTATATGCGCATGACTCTCAAGGTGCTGACCTTGAGTGACGATCTGGGAGTGTACCGCA
ACGACAGGATGCACCGCGCAGTGAGCGCCAGCAGAAGGCGTGAGCTGAGCGACAGAGAACTTATGCACAGCTTGCAA
AGAGCTCTGACTGGGGCTGGAACCGAGGGGGAGAACTACTTTGACATGGGAGCGGACTTGCAATGGCAGCCCAGTCG
CAGGGCCCTGGACGCAGCAGGGTATGAGCTTCCTTACATAGAAGAGGTGGATGAAGGCCAGGATGAGGAGGGCGAGT
ACCTGGAAGACTGATGGCGCGACCATCCATATTTTTGCTAGATGGAACAGCAGGCACCGGACCCCGCAAAACGGGCG
GCGCTACAGAGCCAGCCGTCCGGCATTAACTCCTCGGACGATTGGAGCCAGGCCATGCAACGCATCATGGCGCTGAC
GACCCGCAACCCCGAAGCCTTTAGGCAGCAACCCCAGGCCAACCGCCTTTCTGCTATCCTGGAGGCCGTAGTGCCCT
CCCGCTCCAACCCCACACACGAGAAGGTCCTGGCCATCGTGAACGCGCTGGTGGAGAACAAAGCCATACGTCCCGAT
GAGGCTGGGCTGGTATACAATGCCCTATTGGAGCGCGTAGCCCGCTACAACAGCAGCAACGTGCAGACCAACCTGGA
CCGGATGGTGACCGATGTGCGCGAGGCCGTGTCTCAGCGCGAGCGGTTCCAGCGAGACGCCAATTTAGGGTCGCTGG
TGGCTTTGAACGCCTTCCTCAGCACTCAGCCTGCCAACGTGCCTCGCGGTCAGCAAGACTACACAAACTTTCTAAGT
GCATTGAGACTCATGGTGGCCGAAGTCCCTCAAAGCGAAGTGTACCAGTCCGGGCCAGACTACTTTTTCCAGACCAG
CAGACAGGGCTTGCAGACAGTGAACCTGAGCCAGGCTTTTAAGAACCTGAATGGTCTGTGGGGAGTGCGCGCCCCAG
TGGGAGATCGGGCGACCGTGTCTAGCTTGCTGACCCCCAACTCCCGCCTACTACTGCTCTTGGTAGCCCCATTCACT
GACAGCGGTAGCATCGACCGTAATTCGTACTTGGGCTATCTGTTGAACCTGTATCGCGAGGCCATAGGGCAAACTCA
GGTAGATGAGCAAACCTATCAAGAAATTACCCAAGTGAGCCGCGCTCTGGGTCGGGAGGACACTGGCAGCTTGGAAG
CCACCTTAAACTTCTTGCTGACCAACCGGTCGCAGAAGATCCCTCCTCAGTATGCGCTTACCGCGGAGGAGGAACGG
ATCCTGAGATACGTGCAGCAGAGCGTGGGACTGTTCCTAATGCAGGAGGGGGCGACTCCTACTGCTGCGCTCGATAT
GACAGCCCGAAACATGGAGCCCAGCATGTATGCCAGTAACCGGCCTTTTATCAATAAACTGCTAGACTACTTACACA
GGGCGGCTGCTATGAACTCTGATTATTTCACCAATGCTATCCTGAACCCCCATTGGCTGCCCCCACCTGGGTTCTAT
ACGGGCGAGTATGACATTGCCCGACCCAATGACGGGTTTTTATGGGACGATGTGGACAGTAGTGTTTTCTCCCCGCC
TCCTGGTTATAACACTTGGAAGAAGGAAGGTGGCGATAGAAGGCACTCTTCCGTGTCACTGTCCGGGGCAACGGGTG
CTGCCGCAGCGGCTCCCGAGGCCGCAAGTCCTTTCCCTAGTTTGCCATTTTCGCTAAACAGTGTACGCAGCAGTGAG
CTGGGAAGAATAACCCGTCCTCGCTTGATCGGCGAGGAGGAGTATTTGAACGACTCCCTGTTGAGACCCGAGAGGGA
GAAGAATTTCCCCAACAACGGGATAGAAAGCTTGGTTGACAAAATGAACCGCTGGAAGACGTACGCGCACGATCCCC
GGGCGCTGGGGGATAGCCGGGGCAGCGCTACCCGTAAACGCCAGTGGCACGACAGGCAGCGGGGCCTGGTGTGGGCC
GATGATGATTCCGCCGACGACAGCAGCGTGTTGGACTTGGGTGGGAGTGGTGGTAACCCGTTCGCTCACCTGCGCCC
CCGCGTCGGGCGCCTGATGTAAGAAACCGAAAATAAATACTCACCAAGGCCATGGCGACCAGCGTGCGTTCGTTTCT
TCTCTGTTATATCTAGTATGATGAGGCGAACCGTGCTAGGCGGAGCGGTGGTGTATCCGGAGGGTCCTCCTCCTTCG
TACGAGAGCGTGATGCAGCAGGCGGCGGCGGCGACGATGCAGCCACCACTGGAGGCTCCCTTTGTACCCCCTCGGTA
CCTGGCACCTACGGAGGGGAGAAACAGCATTCGTTACTCGGAGCTGGCACCATTGTATGATACCACCCGGTTGTATT
TGGTGGACAACAAGTCCGCGGACATCGCCTCACTGAACTATCAGAACGACCACAGCAACTTCCTCACCACGGTGGTG
CAAAACAATGACTTTACCCCCACGGAGGCCAGCACCCAGACCATCAACTTTGACGAGCGGTCGCGATGGGGCGGTCA
GCTGAAGACTATCATGCACACCAACATGCCCAACGTGAACGAGTACATGTTTAGCAACAAGTTCAAAGCTCGGGTGA
TGGTGTCTAGAAAGGCTCCTGAAGGTGTCACAGTAGATGACAATTATGATCACAAGCAGGATATTTTGGAATATGAG
TGGTTTGAGTTTACTCTACCGGAAGGGAATTTCTCAGCCACAATGACCATTGACCTAATGAACAATGCCATCATTGA
TAATTACCTTGAAGTGGGCAGACAGAATGGAGTGTTAGAGAGTGACATTGGTGTTAAATTTGACACCAGGAACTTTA
GACTGGGTTGGGATCCGGAAACTAAGTTGATTATGCCTGGGGTTTACACCTATGAGGCATTCCATCCTGACATTGTA
TTGTTGCCTGGTTGCGGAGTTGACTTTACTGAAAGTCGCCTTAGTAACTTGCTTGGTATCAGGAAAAGACACCCATT
CCAGGAGGGTTTTAAGATCTTGTATGAGGATCTTGAAGGGGGTAATATCCCGGCCCTGTTGGATGTAGAAGCCTATG
AGAACAGTAAGAAAGAACAAGAAGCCAAAACAGAAGCCGCTAAAGCTGCTGCTATTGCTAAAGCCAACATAGTTGTC
AGCGACCCTGTAAGGGTGGCTAATGCAGAAGAAGTCAGAGGAGACAACTATACAGCTTCATCTGTTGCAACTGACGA
ATCGCTATTGGCTGCTGTGGCCGAAACTACAGAGACAAAACTCACTATTAAACCTGTAGAAAAAGACAGCAAGAGTA
GAAGTTACAATGTCTTGGAAGATAAAGTGAATACAGCCTACCGCAGCTGGTACCTGTCCTACAACTATGGTGACCCT
GAAAAAGGAGTCCGTTCCTGGACACTGCTCACCACCTCGGATGTCACCTGTGGAGCAGAGCAGGTGTACTGGTCGCT
CCCAGACATGATGCAGGACCCTGTCACATTCCGTTCCACGAGACAAGTCAGCAACTATCCAGTGGTAGGTGCAGAGC
TCATGCCGGTCTTCTCAAAGAGTTTCTACAACGAGCAAGCCGTGTACTCCCAGCAGCTTCGCCAGTCCACCTCGCTC
ACGCACGTCTTCAACCGCTTCCCTGAGAACCAGATCCTCATCCGCCCGCCAGCGCCCACCATTACCACCGTCAGTGA
AAACGTTCCTGCTCTCACAGATCACGGGACCCTGCCGTTGCGCAGCAGTATCCGGGGAGTCCAGCGCGTGACCGTTA
CTGACGCCAGACGCCGCACCTGCCCCTACGTCTACAAGGCCCTGGGCATAGTCGCGCCGCGCGTCCTTTCAAGCCGC
ACTTTCTAAAAAAAAAAATGTCCATTCTTATCTCACCTAGTAATAACACCGGTTGGGGCCTGCGCGCGCCAAGCAAG
ATGTACGGAGGTGCTCGCAAACGCTCTACACAGCACCCTGTGCGCGTGCGCGGGCACTTCCGCGCTCCATGGGGCGC
CCTCAAGGGTCGTGCCCGCACTAGAACCACCGTCGATGATGTGATCGACCAGGTGGTGGCCGATGCTCGTAATTATA
CTCCTACTGCACCTACATCTACTGTGGATGCAGTTATTGACAGCGTAGTGGCTGACGCCCGCGCCTATGCTCGCCGG
AAGAGCAGGCGGAGACGCATCGCCAGGCGCCACCGGGCTACTCCCGCTATGCGAGCGGCAAGAGCTCTGCTACGGAG
GGCCAAACGCGTGGGGCGAAGAGCTATGCTTAGAGCGGCCAGACGCGCGGCTTCAGGTGCCAGTGCCGGCAGGTCCC
GCAGGCGCGCAGCCACGGCGGCAGCAGCGGCCATTGCCAACATGGCCCAACCGCGAAGAGGCAATGTGTACTGGGTG
CGCGACGCCACCACCGGCCAGCGCGTGCCCGTGCGCACCCGCCCCCCTCGCTCTTAGAAGATACTGAGCAGTCTCCG
ATGTTGTGTCCCAGCGAGGATGTCCAAGCGCAAATACAAGGAAGAGATGCTCCAGGTCATCGCGCCTGAAATCTACG
GTCCGCCGGTGAAGGATGAAAAAAAGCCCCGCAAAATCAAGCGGGTCAAAAAGGACAAAAAGGAAGAAGATGGCAAT
GATGGTCTGGCGGAGTTTGTACGCGAGTTCGCCCCAAGGCGGCGTGTGCAGTGGCGTGGACGCAAAGTGCGGCCTGT
GCTGAGACCTGGAACCACGGTGGTCTTTACGCCCGGCGAGCGCTCCAGCACTGCTTTTAAGCGGTCCTATGATGAGG
TGTATGGGGATGATGATATTCTGGAGCAGGCGGCCGACCGCCTGGGCGAGTTTGCTTATGGCAAGCGCTCCCGCTCG
AGCCCCAAGGAGGAGGCGGTGTCCATTCCCTTGGACAATGGGAATCCCACCCCTAGTCTCAAGCCAGTCACCCTGCA
GCAAGTGCTGCCCGTGCCTCCACGCAGAGGCAACAAGCGAGAGGGTGAGGATCTGTATCCCACTATGCAATTGATGG
TGCCCAAGCGCCAGCGGCTGGAGGACGTGCTGGAGAAAATGAAAGTGGATCCCGATATACAACCTGAGGTCAAAGTG
AGACCCATCAAGCAGGTGGCGCCAGGTTTGGGAGTACAAACCGTAGACATCAAGATTCCCACCGAGTCCATGGAAGT
CCAAACCGAACCTGCAAAGCCCACAACCACCTCCATTGAGGTGCAAACGGATCCCTGGATGACCGCACCCGTTACAA
CTCCAGCTGCTGTCAACACCACTCGAAGATCCCGGCGAAAGTACGGTCCAGCAAGTTTGCTGATGCCAAATTATGCT
CTGCACCCATCCATTATTCCAACTCCGGGTTACCGAGGCACTCGCTACTACCGCAGCAGGAGCAGCACTTCCCGCCG
TCGCCGCAAAACACCTGCAAGTCGTAGTCACCGTCGTCGCCGCCGCCCCACCAGCAATCTGACTCCCGCTGCTCTGG
TGCGGAGAGTGTATCGCGATGGCCGCGCGGATCCCCTGACGTTGCCGCGCGTACGCTACCATCCAAGCATCACAACT
TAACAACTGTTGCCGCTGCCTCCTTGCAGATATGGCCCTCACTTGCCGCCTTCGTGTCCCCATTACTGGCTACCGAG
GAAGAAACTCGCGCCGTAGAAGAGGGATGTTGGGGCGCGGAATGCGACGCCACAGGCGGCGGCGCGCTATCAGCAAG
AGGCTGGGGGGTGGCTTTCTGCCTGCTCTGATCCCCATCATAGCCGCGGCGATCGGGGCGATACCAGGCATAGCTTC
CGTGGCGGTTCAGGCCTCGCAGCGCCACTGACATTGGAAAAACTTATAAATAAAACAGAATGGACTCTGATGCTCCT
GGTCCTGTGACTATGTTTTTGTAGAGATGGAAGACATCAATTTTTCATCCCTGGCTCCGCGACACGGCACGAGGCCG
TACATGGGCACCTGGAGCGACATCGGCACCAGCCAACTGAACGGGGGCGCCTTCAATTGGAGCAGTATCTGGAGCGG
GCTTAAAAATTTTGGCTCTACCATAAAAACCTATGGGAACAAAGCTTGGAACAGCAGCACAGGGCAGGCATTGAGAA
ATAAGCTTAAAGAGCAAAACTTCCAACAGAAGGTGGTTGATGGAATCGCCTCTGGTATCAATGGGGTGGTGGATCTG
GCCAACCAGGCCGTGCAGAAACAGATAAACAGCCGCATTGACCCGCCGCCGTCAGCCCCGGGTGAAATGGAAGTGGA
GGAAGATCTCCCTCCCCTTGAAAAGCGGGGCGACAAGCGTCCGCGCCCCGATCTGGAGGAGACACTAGTCACACGCT
CAGACGACCCGCCCTCCTACGAGGAGGCAGTGAAGCTTGGAATGCCCACCACCAGACCTGTAGCCCCCATGGCTACC
GGGGTAATGAAACCTTCTCAGTCACACCGACCCGCTACCTTGGACTTGCCTCCCCCTGCTGTTGCAGCGCCTGCTCG
CAAGCCTGTCGCTACCCCGAAGCCCACCACCGTACAGCCCGTCGCCGTAGCCAGACCGCGTCCTGGGGGCACTCCAC
GTCCGAATGCAAACTGGCAGAGTACTCTGAACAGCATCGTGGGTCTGGGCGTGCAAAGTGTAAAGCGCCGTCGCTGC
TTTTAAATTAATATGGAGTAGCGCTTAACTTGCCTGTCTGTGTGTATGTGTCATCATCACGCCGCCGCCGCAGCAAC
AGCAGAGGAGCAAGGAAGAGGTCGCGCGCCGAGGCTGAGTTGATTTCAAGATGGCCACCCCATCGATGCTGCCCCAG
TGGGCATACATGCACATCGCCGGACAGGATGCTTCGGAGTACCTGAGTCCGGGTCTGGTGCAGTTCGCCCGCGCCAC
AGACACCTACTTCAATCTGGGGAACAAGTTTAGGAACCCCACCGTGGCGCCCACCCATGATGTGACCACCGACCGCA
GTCAGCGGCTGATGCTGCGCTTTGTGCCCGTTGACCGGGAAGACAATACCTACGCATACAAAGTTCGATACACCTTG
GCTGTGGGCGACAACAGAGTGCTGGATATGGCCAGCACTTTCTTTGACATTCGGGGTGTGTTGGATAGAGGCCCTAG
CTTCAAGCCATACTCTGGCACTGCTTACAACTCGTTGGCCCCTAAGGGCGCTCCCAATACATCTCAGTGGATTGCTG
AAGGCGTAAAAAAAGAAGATGGGGGATCTGACGAAGAGGAAGAGAAAAATCTCACCACTTACACTTTTGGAAATGCC
CCAGTGAAAGCAGAAGGTGGTGATATCACTAAAGACAAAGGTCTTCCAATTGGTTCAGAAATTACAGACGGCGAAGC
CAAACCAATTTATGCAGATAAACTATACCAACCAGAACCTCAGGTGGGAGATGAAACTTGGACTGACACAGATGGAA
CAACTGAGAAGTATGGTGGTAGAGCTCTAAAGCCAGAAACTAAAATGAAACCCTGCTATGGGTCTTTTGCTAAACCC
ACTAACGTCAAAGGCGGACAGGCAAAACAAAAAACTACTGAACAACCGCAAAACCAGCAGGTTGAATATGATATTGA
CATGAACTTTTTTGATGAAGCGTCACAGAAAGCAAACTTCAGTCCAAAAATTGTGATGTATGCAGAAAATGTAGACT
TGGAAACCCCAGACACTCATGTGGTGTACAAACCTGGTACTTCAGAAGAAAGTTCTCATGCTAATCTGGGTCAACAA
TCTATGCCCAACAGACCCAACTACATTGGCTTTAGAGATAACTTTATTGGACTTATGTACTACAACAGTACTGGCAA
CATGGGAGTGCTGGCAGGTCAAGCATCCCAATTGAATGCGGTGGTTGACTTGCAGGACAGAAACACAGAACTATCAT
ATCAACTACTGCTTGACTCTCTGGGTGACAGAACCAGATACTTCAGCATGTGGAATCAAGCAGTCGATAGCTATGAT
CCTGATGTGCGCATTATTGAAAATCATGGGGTGGAAGATGAGCTTCCCAACTACTGCTTTCCATTGGATGGAGTAGG
GGTACCAATAAGTAGTTACAAAATAATTGAACCAAACGGACAGGGTGCAGATTGGAAAGAGCCTGACATAAATGGAA
CAAGTGAAATTGGACAAGGAAATCTCTTTGCCATGGAAATTAACCTCCAAGCTAATCTCTGGAGAAGTTTTCTTTAT
TCCAATGTGGCTCTGTATCTCCCAGACTCCTACAAATACACCCCAGCCAATGTCACTCTTCCAACTAACACCAACAC
TTATGACTACATGAATGGGCGGGTGGTTCCCCCATCCCTGGTGGATACCTACGTAAACATTGGCGCCAGATGGTCTT
TGGATGCCATGGACAATGTCAACCCCTTTAACCATCACCGCAACGCTGGCCTGCGATACCGGTCCATGCTTTTGGGC
AATGGTCGTTACGTGCCTTTCCACATTCAAGTGCCTCAGAAATTCTTTGCTGTGAAGAACCTGCTGCTTCTACCCGG
TTCTTACACCTACGAGTGGAACTTCAGAAAGGATGTGAACATGGTCCTGCAGAGTTCCCTTGGTAATGATCTCCGGG
TCGATGGTGCCAGCATAAGTTTTACCAGCATCAATCTCTATGCCACCTTCTTCCCCATGGCCCACAACACTGCCTCC
ACCCTTGAAGCCATGCTGCGCAATGACACCAATGATCAATCATTCAATGACTACCTTTCTGCTGCCAACATGCTCTA
CCCCATCCCGGCCAACGCTACCAACGTTCCCATCTCCATTCCCTCTCGCAACTGGGCCGCCTTCAGAGGCTGGTCCT
TCACCAGACTCAAAACCAAGGAGACTCCCTCTTTGGGATCAGGGTTCGATCCCTACTTTGTTTACTCTGGTTCTATA
CCCTACCTGGATGGTACCTTCTACCTTAACCACACTTTCAAGAAAGTCTCCATCATGTTTGACTCTTCAGTGAGCTG
GCCTGGTAATGACAGATTGCTAAGTCCAAATGAGTTCGAAATCAAGCGCACAGTTGATGGGGAAGGCTACAATGTGG
CCCAATGTAACATGACCAAAGACTGGTTCCTGGTCCAGATGCTTGCCAACTACAACATTGGATACCAGGGCTTCTAC
GTTCCTGAGGGTTACAAGGATCGCATGTACTCCTTCTTCAGAAACTTCCAGCCCATGAGTAGACAGGTGGTTGATGA
GATTAACTACAAAGACTATAAAGCTGTCGCCGTACCCTACCAGCATAATAACTCTGGCTTTGTGGGTTACATGGCTC
CTACCATGCGTCAGGGTCAAGCGTACCCTGCTAACTACCCATACCCCCTAATTGGAACCACTGCAGTAACCAGTGTC
ACCCAGAAAAAATTCCTGTGCGACAGGACCATGTGGCGCATCCCATTCTCTAGCAACTTCATGTCCATGGGTGCCCT
TACAGACCTGGGACAGAACTTGCTGTATGCCAACTCGGCCCATGCGCTGGACATGACTTTTGAGGTGGATCCCATGG
ATGAGCCCACCCTGCTTTATCTTCTTTTCGAAGTCTTCGACGTGGTCAGAGTGCACCAGCCACACCGCGGCGTCATC
GAGGCCGTCTACCTGCGCACACCGTTCTCGGCCGGCAACGCCACCACATAAGAAGCCTCTTGCTTCTTGCAAGCAGC
AGCTGCAGCCATGTCATGCGGGTCCGGAAACGGCTCCAGCGAGCAAGAGCTCAAAGCCATCGTCCGAGACCTGGGCT
GCGGACCCTATTTCCTGGGAACCTTTGACAAGCGTTTCCCGGGGTTCATGGCCCCCGACAAGCTCGCCTGCGCCATA
GTCAACACTGCCGGACGCGAGACGGGGGGAGAGCACTGGCTGGCTTTTGGTTGGAACCCGCGCTCCAACACCTGCTA
CCTTTTTGATCCTTTTGGGTTCTCGGATGAGCGACTCAAACAGATTTACCAGTTTGAGTACGAGGGGCTCCTGCGCC
GCAGTGCCCTTGCTACCAAAGACCGCTGCATCACCCTGGAAAAGTCCACCCAGAGCGTGCAGGGCCCGCGCTCAGCC
GCCTGTGGACTTTTTTGCTGTATGTTCCTTCATGCCTTTGTGCACTGGCCCGACCGCCCCATGAACGGAAACCCCAC
CATGAAGTTGCTGACTGGGGTGTCAAACAGCATGCTCCAATCACCCCAAGTCCAGCCCACCCTGCGTCGCAACCAGG
AGGCGCTATATCGCTTCCTAAACACCCACTCATCTTACTTTCGTTCTCACCGCGCACGCATCGAAAGGGCCACCGCG
TTTGACCGTATGGATATGCAATAAGTCATGTAAAACCGTGTTCAATAAAAAGCACTTTATTTTTACATGCACTAAGG
CTCTGGTTTTTTGCTCATTCGTTTTCATCATTCACTCAGAAATCAAATGGGTTCTGGCGTGAGTCAGAGTGACCCGT
GGGCAGGGAGACGTTGCGGAACTGTAACCTGTTCTGCCACTTGAACTCGGGGATCACCAGCTTGGGAACTGGAATTT
CGGGAAAGGTGTCTTGCCACAACTTTCTGGTCAGTTGCAGGGCGCCAAGCAGGTCAGGAGCAGAGATCTTGAAATCA
CAGTTGGGGCCGGCATTCTGGACACGGGAGTTGCGGTACACTGGGTTGCAACACTGGAACACCATCAAGGCTGGGTG
TCTCACGCTTGCCAGCACGGTCGGGTCACTGATGGTAGTCACATCCAAGTCTTCAGCATTGGCCATTCCAAAGGGGG
TCATCTTACAGGTCTGCCTGCCCATCACGGGAGCGCAGCCTGGCTTGTGGTTGCAATCGCAATGAATGGGGATCAGC
ATCATCCTGGCTTGGTCGGGGGTTATCCCTGGGTACACGGCCTTCATGAAGGCTTCGTACTGCTTGAAAGCTTCCTG
AGCCTTACTTCCCTCGGTGTAAAACATCCCACAGGACTTGCTGGAAAATTGGTTAGTAGCACAGTTGGCATCATTCA
CACAGCAGCGGGCATCGTTGTTGGCCAACTGGACCACATTTCTGCCCCAGCGGTTCTGGGTGATCTTGGCTCTGTCT
GGGTTCTCCTTCATAGCGCGCTGCCCGTTTTCGCTCGCCACATCCATCTCGATAATGTGGTCCTTCTGGATCATAAT
AGTGCCATGCAGGCATTTCACCTTGCCTTCGTAATCGGTGCATCCATGAGCCCACAGAGCGCACCCGGTGCACTCCC
AATTATTGTGGGCGATCTCAGAATAAGAATGCACCAATCCCTGCATGAATCTTCCCATCATCGCTGTCAGGGTCTTC
ATGCTACTAAATGTCAGCGGGATGCCACGGTGCTCCTCGTTCACATACTGGTGGCAGATACGCTTGTACTGCTCGTG
CTGCTCTGGCATCAGCTTGAAAGAGGTTCTCAGGTCATTATCCAGCCTATACCTCTCCATTAGCACAGCCATCACTT
CCATGCCCTTCTCCCAGGCAGATACCAGGGGCAAGCTCAAAGGATTCCTAACAGCAATAGAAGTAGCTCCTTTAGCT
ATAGGGTCATTCTTGTCGATCTTCTCAACACTTCTCTTGCCATCCTTCTCAATGATGCGCACCGGGGGGTAGCTGAA
GCCCACGGCCACCAACTGAGCCTGTTCTCTTTCTTCTTCGCTGTCCTGGCTGATGTCTTGCAGAGGGACATGCTTGG
TCTTCCTGGGCTTCTTCTTGGGAGGGATCGGGGGAGGACTGTTGCTCCGTTCCGGAGACAGGGATGACCGCGAAGTT
TCGCTTACCAGTACCACCTGGCTCTCGATAGAAGAATCGGACCCCACGCGACGGTAGGTGTTCCTCTTCGGGGGCAG
AGGTGGAGGCGACTGAGATGGGCTGCGGTCCGGCCTTGGAGGCGGATGGCTGGCAGAGCCCATTCCGCGTTCGGGGG
TGTGCTCCCGTTGGCGGTCGCTTGACTGATTTCCTCCGCGGCTGGCCATTGTGTTCTCCTAGGCAGAGAAACAACAG
ACATGGAAACTCAGCCATCACTGCCAACATCGCTGCAAGCGCCATCACACCTCGCCCCCAGCAGCGACGAGGAGGAG
AGCTTAACCACCCCACCACCCAGTCCCGCTACCACCACCTCTACCCTCGATGATGAGGAGGAGGTCGACGCAGCCCA
GGAGATGCAGGCGCAGGATAATGTGAAAGCGGAAGAGATTGAGGCAGATGTCGAGCAGGACCCGGGCTATGTGACAC
CGGCGGAGCACGAGGAGGAGCTGAAACGTTTTCTAGACAGAGAGGATGACGACCGCCCAGAGCATCACCAGGAGGCT
GGCCTCGGGGATCATGTTGCCGACTACCTCTCCGGGCTTGGGGGGGAGGACGTGCTCCTCAAACATCTAGCAAGGCA
GTCGATCATAGTTAAAGACGCACTACTCAACCTCACCGAAGTGCCCATCAGTGTGGAAGAGCTTAGCCGCGCCTACG
AGCTGAACCTCTTTTCGCCTCAGATACCCCCCAAGCGGCAGCGAAACGGCACCTGCGAGGCCAACCCTCGACTCAAC
TTCTATCCAGCTTTTACTGTCCCCGAAGTGCTGGCCACCTACCACATCTTTTTTAAGAACCAAAAGATTCCAGTCTC
CTGCCGCGCCAACCGCACCCGCGCAGATGCCCTTCTCAACTTGGGTCCGGGAGCTCGTTTACCTGATATAGCTTCCT
TGGAAGAGGTTCCAAAGATCTTTGAGGGTCTGGGAAGTGATGAGACTCGGGCCGCAAATGCTCTGCAACAGGGAGAG
AATGGCATGGATGAACATCACAGCGCTCTAGTGGAACTGGAGGGTGACAATGCCCGGCTTGCAGTGCTCAAGCGCAG
TATCGTGGTCACCCATTTTGCCTACCCCGCTGTTAACCTGCCGCCCAAAGTCATGAGCGCTGTCATGGACCATCTGC
TCATCAAACGAGCAAGTCCACTTTCAGAAAACCAGAACATGCAGGATCCAGACGCCTCGGACGAGGGCAAGCCGGTA
GTCAGTGACGAGCAGCTATCTCGCTGGCTGGGTACCAACTCCCCCCGAGATTTGGAAGAAAGACGCAAGCTTATGAT
GGCTGTAGTGCTAGTAACTGTTGAGTTGGAGTGTCTGCGCCGCTTTTTTACCGACCCCGAGACCCTGCGCAAGCTAG
AGGAGAACCTGCACTACACCTTCAGACATGGCTTCGTGCGCCAGGCATGCAAGATCTCCAACGTGGAGCTCACCAAC
CTGGTTTCATACATGGGCATTTTGCATGAGAACCGGCTAGGGCAGAGCGTTCTGCACACCACCCTGAAGGGGGAGGC
CCGCCGCGACTACATCCGAGACTGTGTCTACCTCTACCTCTGCCATACCTGGCAGACTGGTATGGGTGTGTGGCAAC
AGTGTTTGGAAGAGCAGAACCTTAAAGAGCTGGACAAGCTCTTGCAGAGATCCCTCAAAGCCCTGTGGACAGGTTTT
GACGAGCGCACCGTCGCCTCGGACCTGGCGGACATCATCTTCCCCGAGCGTCTTAGGGTTACTCTGCGAAACGGCCT
GCCAGACTTCATGAGCCAGAGCATGCTTAACAACTTTCGCTCTTTCATCCTGGAACGCTCCGGTATCCTGCCTGCCA
CCTGCTGTGCGCTGCCCTCCGACTTTGTGCCTCTCACCTACCGCGAGTGCCCACCGCCGCTATGGAGCCACTGCTAC
CTATTCCGCCTGGCCAACTACCTCTCCTACCACTCGGATGTGATAGAGGATGTGAGCGGAGACGGCCTGCTGGAATG
CCACTGCCGATGCAATTTATGCACACCCCACCGCTCCCTCGCCTGCAACCCCCAGTTGCTAAGCGAGACCCAGATCA
TCGGCACCTTCGAGTTGCAGGGTCCCAACAGTGAAGGCGAGGGGTCTTCTCCGGGGCAGAGTCTGAAACTGACACCG
GGGCTGTGGACCTCCGCCTACCTGCGCAAGTTTTATCCCGAGGACTATCATCCCTATGAGATCAGGTTCTATGAGGA
CCAGTCACATCCTCCCAAAGTCGAGCTCTCAGCCTGCGTCATCACCCAGGGGGCAATTCTGGCCCAATTGCAAGCCA
TCCAAAAATCCCGCCAAGAATTTCTGCTGAAAAAGGGAAGCGGGGTCTACCTTGACCCCCAGACCGGTGAGGAGCTC
AACACAAGGTTCCCCCAGGATGTCCCATCGCCGAGGAAGCAAGAAGCTGAAGGTGCAGCTGTCACCCCCAGAGGATA
TGGAGGAAGACTGGGACAGTCAGGCAGAGGAGGAGATGGAAGATTGGGACAGCCAGGCAGAGGAGGTGGACAGCCTG
GAGGAAGACAGTTTGGAGGAGGAAGACGAGGAGGCAGAGGAGGTGGAAGAAGCAACCGCCGCCAAACAGTTGTCATC
GGCGGCGGAGACAAGCAAGTCCCCAGACAGCAGCACGGCTACCATCTCCGCTCCGGGTCGGGGGGCCCAGCGGCGGC
CCAACAGTAGATGGGACGAGACCGGGCGATTTCCAAACCCGACCACCGCTTCCAAGACCGGTAAGAAGGAGCGACAG
GGATACAAGTCCTGGCGTGGACATAAAAACGCTATCATCTCCTGCTTGCATGAATGCGGGGGCAACATATCCTTCAC
CCGGCGATACCTGCTTTTCCACCACGGTGTGAACTTCCCCCGCAATATCTTGCATTACTACCGTCACCTCCACAGCC
CCTACTGCAGTCAGCAAGTCCCGGCAACCCCGACAGAAAAAGACAGCAGCGACAACGGTGACCAGAAAACCAGCAGT
TAGAAAATCCACAACAAGTGCAGCAGGAGGAGGACTGAGGATCACAGCGAACGAGCCAGCGCAGACCAGAGAGCTGA
GGAACCGGATCTTTCCAACCCTCTATGCCATCTTCCAGCAGAGTCGGGGGCAAGAGCAGGAATTGAAAGTAAAAAAC
CGATCTCTGCGCTCGCTCACCAGAAGTTGTTTGTATCACAAGAGCGAAGACCAACTTCAGCGCACTCTCGAGGACGC
CGAGGCTCTCTTCAACAAGTACTGCGCGCTGACTCTTAAAGAGTAGCCCTTGCCCGCGCTCATTCGAAAACGGCGGG
AATCACGTCACCCTTGGCAGCTGTCCTTTGCCCTCGTCATGAGTAAAGACATTCCCACGCCTTACATGTGGAGCTAT
CAGCCCCAAATGGGGTTGGCAGCAGGTGCTTCCCAGGACTACTCCACCCGCATGAATTGGCTTAGCGCCGGGCCCTC
AATGATATCACGGGTTAATGATATACGAGCTTATCGAAACCAGTTACTCCTAGAACAGTCAGCTCTTACCACCACAC
CCCGCCAACACCTTAATCCCCGAAATTGGCCCGCCGCCCTGGTGTACCAGGAAAATCCCGCTCCCACCACCGTACTA
CTTCCTCGAGACGCCCAGGCCGAAGTTCAGATGACTAACGCAGGTGTACAGCTGGCGGGCGGTTCCGCCCTATGTCG
TCACCGGCCTCAACAGAGTATAAAACGCCTGGTGATCAGAGGCCGAGGTATCCAGCTCAACGACGAGTCGGTTAGCT
CTTCGCTTGGTCTGCGACCAGACGGAGTCTTCCAGATCGCCGGCTGTGGGAGATCTTCCTTCACTCCTCGTCAGGCT
GTGCTGACTTTGGAGAGTTCGTCCTCGCAGCCCCGCTCGGGCGGCATCGGAACTCTCCAGTTTGTGGAGGAGTTTAC
TCCCTCTGTCTACTTCAACCCCTTCTCCGGCTCTCCTGGCCAGTACCCGGACGAGTTCATACCGAACTTCGACGCAA
TCAGCGAGTCAGTGGATGGCTATGATTGATGTCTAATGGTGGCGCGGCTGAGCTAGCTCGACTGCGACACCTAGACC
ACTGCCGCCGCTTTCGCTGTTTCGCCCGGGAACTCACCGAGTTCATTTACTTCGAACTCTCCGAGGAGCACCCTCAG
GGTCCGGCCCACGGAGTGCGGATTACCATCGAAGGGGGAATAGACTCTCGCCTGCATCGCATCTTCTCCCAGCGGCC
CGTGCTGATTGAGCGCGACCAGGGAAATACAACCATCTCCATCTACTGCATCTGTAACCACCCCGGATTGCATGAAA
GCCTTTGCTGTCTTGTTTGTGCTGAGTTTAATAAAAACTGAGTTAAGACCCTCCTACGGACTACCGCTTCTTCAATC
AGGACTTTACAACACCAACCAGATCTTCCAGAAGACCCAGACCCTTCCTCCTCTGATCCAGGACTCTAACTCTACCT
TACCAGCACCCTCCACTACTAACCTTCCCGAAACTAACAAGCTTGGATCTCATCTGCAACACCGCCTTTCACGAAGC
CTTCTTTCTGCCAATACTACCACTCCCAAAACCGGAGGTGAGCTCCGCGGTCTTCCTACTGACGACCCCTGGGTGGT
AGCGGGTTTTGTAACGTTAGGATTAGTTGCGGGTGGGCTTGTGCTAATCCTTTGCTACCTATACACACCTTGCTGTG
CATATTTAGTCATATTGTGCTGTTGGTTTAAGAAATGGGGGCCATACTAGTCGTGCTTGCTTTACTTTCGCTTTTGG
GTCTGGGCTCTGCTAATCTCAATCCTCTTGATCACGATCCATGTCTAGACTTCGACCCAGAAAATTGCACACTTACT
TTTGCACCCGACACAAGCCGTCTCTGTGGAGTTCTTATTAAGTGCGGATGGGACTGCAGGTCCGTTGAAATTACACA
TAATAACAAAACATGGAACAATACATTATCCACCACATGGGAACCAGGAGTTCCCGAGTGGTATACTGTCTCTGTCC
GAGGTCCTGACGGTTCCATTCGCATTAGTAACAACACTTTCATTTTTTCTGAAATGTGCGATCTGGCCATGTTTATG
AGCAAACAGTATGACCTATGGCCTCCTAGCAAAGAGAACATTGTGGCATTTTCCATTGCTTATTGCTTGGTAACATG
CATCATCACTGCTATCATTTGTGTGTGCATACACTTGCTTATAGTTATTCGCCCTAGACAAAGCAATGAGGAAAAAG
AGAAAATGCCTTAACCTTTTTCCTCATACCTTTTCTTTACAGCATGGCTTCTGTTACAGCTCTAATTATTGCCAGCA
TTGTCACTGTCGCTCACGGGCAAACAATTGTCCATATTACCTTAGGACATAATCACACTCTTGTAGGGCCCCCAATT
ACTTCAGAGGTTATTTGGACCAAACTTGGAAGTGTTGATTATTTTGATATAATTTGCAACAAAACTGAACCAATATT
TGTAATCTGTAACAGACAAAATCTCACGTTAATTAATGTTAGCAAAATTTATAACGGTTACTATTATGGTTATGATA
GATCCAGTAGTCAATATAAAAATTACTTAGTTCGCATAACTCAGCCCAAATCAACAGTGCCAACTATGACAATAATT
AAAATGGCTAATAAAGCATTAGAAAATTTTACATTACCAACAACGCCCAATGAAAAAAACATTCCAAATTCAATGAT
TGCAATTATTGCGGCGGTGGCATTGGGAATGGCACTAATAATAATATGCATGTTCCTATATGCTTGTTGCTATAAAA
AGTTTCAACATAAACAGGATCCACTACTAAATTTTAACATTTAATTTTTTATACAGATGATTTCCACTACAATTTTT
ATCATTACTAGCCTTGCAGCTGTAACTTATGGCCGTTCACACCTAACTGTACCTGTTGGCTCAACATGTACACTACA
AGGACCCCAAGAAGGCTATGTCACTTGGTGGAGAATATATGATAATGGAGGGTTCGCTAGACCATGTGATCAGCCTG
GTACAAAATTTTCATGCAACGGAAGAGACTTGACCATTATTAACATAACATTAAATGAGCAAGGCTTCTATTATGGA
ACCAACTATAAAAATAGTTTAGATTACAACATTATTGTAGTGCCAGCCACCACTTCTGCTCCCCGCAAATCCACTTT
CTCTAGCAGCAGTGCCAAAGCAAGCACAATTCCTAAAACAGCTTCTGCTATGTTAAAGCTTCGAAAAATCGCTTTAA
GTAATTCCACAGCAGCTCCCAATACAATTCCTAAATCAACAATTGGCATCATTACTGCCGTGGTAGTGGGATTAATG
ATTATATTTTTGTGCATAATGTACTACGCCTGCTGCTATAGAAAACATGAACAAAAAGGTGATGCATTACTAAATTT
TGATATTGTTTCAATCAAATGCCACTAACACTCTCAATGTGCAGACTACTTTAAAACATGACATGGAAAACCACACT
ACCTCCTATGCATACACAAATATTCAGCCTAAATACGCTATGCAACTTAGAAATCACCATACTAATTGTAATTGGAA
TTCTTACACTATCTGTTATTCTTTATTTTATATTCTGCCGTCAAATACCCAATGTTCATAGAAATTCTAAAAGACGT
CCCATCTATTCTCCTATGATTAGTCGTCCCCATATGGCTCTGAATGAAATCTAAGATCTTTTTTTTTCTTTTACAGT
ATGGTGAACATCAATCATGATTCCTAGAAATTTCTTCTTCACCATACTCATCTGTGCTTTCAATGTCTGTGCTACTT
TCACAGCAGTAGCCACTGCAAGCCCAGACTGTATAGGACCATTTGCTTCCTATGCACTTTTTGCCTTTGTTACTTGC
ATCTGCGTGTGTAGCATAGTCTGCCTGGTTATTAATTTTTTCCAACTGGTAGACTGGATCTTTGTGCGAATTGCCTA
CCTACGTCACCATCCCGAATACCGCAATCAAAATGTTGCGGCACTTCTTAGGCTTATTTAAAACCATGCAGGCTATG
CTACCAGTTATTTTAATTCTGCTACTACCCTGCATTGCCCTACCTTCCACCGCCACTCGCGCTACACCTGAACAACT
TAGAAAATGCAAATTTCAACAACCATGGTCATTTCTTGATTGCTACCATGAAAAATCTGATTTTCCCACATACTGGA
TAGTGATTGTTGGAATAATTAACATACTTTCATGTACCGTTTTCTCAATCACAATATACCCCACATTTAATTTTGGG
TGGAATTCTCCCAATGCACTGGGTTACCCACAAGAACTAGATGAACATATCCCACTACAACACATACAACAACCACT
AGCATTGGTAGAGTATGAAAATGAGCCACAACCTTCACTGCCTCCTGCTATTAGTTACTTCAACCTAACCGGCGGAG
ATGACTGAAATACTCACCACCTCCAATTCCGCCGAGGATCTGCTTGATATGGACGGCCGCGCCTCAGAACAGCGACT
CGCCCAACTACGCATCCGCCAGCAGCAGGAACGCGTGACCAAAGAGCTCAGAGATGTCATCCAAATTCACCAATGCA
AAAAAGGCATATTTTGTTTGGTAAAACAAGCCAAGATATCCTACGAGATCACCGCTACTGACCATCGCCTTTCTTAC
GAACTTGGCCCCCAACGACAAAAATTTACATGCATGGTGGGAATCAACCCTATAGTTATCACCCAGCAAAGTGGAGA
TACTAAGGGTTGCATTCACTGCTCTTGCGATTCCACCGAGTGCACCTACACCCTGCTGAAGACCCTATGCGGCCTAA
GAGACCTGCTACCCATGAATTAAAAATTAATAAAAAATTACTTACTTGAAATCAGCAATAAGGTCTCTGTTGAAATT
TTTTCCCAGCAGCACCTCGCTTCCCTCTTCCCAACTCTGGTATTCTAAACCCCGTTCAGCGGCATACTTTCTCCATA
CTTTAAATGGGATGTCAAATTTTAGCTCCTCTCCTGTACCCACGATCTTCATGTCTTTCTTCCCAGATGACCAAGAG
AGTCCGGCTCAGTGATTCCTTCAACCCTGTCTACCCCTATGAAGATGAAAGCACCTCCCAACACCCCTTTATAAACC
CAGGGTTTATTTCCCCAAATGGCTTTACACAAAGCCCAGACGGAGTTCTTACTTTAAATTGTTTAACCCCACTAACA
ACCACAGGCGGGCCTTTACAGTTAAAAGTGGGAGGGGGACTTATAGTGGATGACACTGATGGGACCTTACAAGAAAA
CATACGTGCTACAGCACCCATTACTAAAAATAATCATTCTGTAGAACTATCCATTGGAAATGGATTAGAAACACAAA
ACAATAAACTATGTGCCAAATTGGGAAATGGGTTAAAATTTAACAACGGTGACATTTGTATAAAGGATAGTATTAAC
ACCTTATGGACTGGAATAAAGCCTCCACCTAACTGTCAAATTGTGGAAAACACTGATACAAACGATGGCAAACTTAC
TTTAGTATTAGTAAAAAACGGAGGGCTTGTTAATGGCTACGTATCTCTAGTTGGTGTATCAGACACTGTGAACCAAA
TGTTCACACAAAAGTCAGCAACCATACAATTAAGATTATATTTCGACTCTTCTGGAAATCTATTAACTGATGAATCA
AACTTAAAAATTCCACTTAAAAATAAATCTTCTACAGCAACCAGTGAAGCTGCAACCAGCAGCAAAGCCTTTATGCC
AAGTACTACAGCTTATCCCTTTAACACCACTACTAGGGATAGTGAAAACTATATTCATGGAATATGTTACTATATGA
CTAGTTATGATAGAAGTCTAGTTCCCTTAAACATTTCTATAATGCTAAACAGCCGTACGATTTCTTCCAATGTTGCC
TATGCCATACAATTTGAATGGAATCTAAATGCAAAAGAATCTCCAGAAAGCAACATAGCTACGCTGACCACATCCCC
CTTTTTCTTTTCTTATATTAGAGAAGACGACAACTAAAAAATAAAGTTTAAGTGTTTTTATTTAAAAATCACAAAAT
TCGAGTAGTTATTTTGCCTCCCCCTTCCCATTTAACAGAATACACCAATCTCTCCCCACGCACAGCTTTAAACATTT
GGATACCATTAGAGATAGACATAGTTTTAGTTTCCACATTCCAAACAGTTTCAGAGCGAGCCAATCTGGGGTCAGTG
ATACATAAAAATGCATCGGGATAGTCTTTTAAAGCGCTTTCACAGTCCAACTGCTGCGGATGCGACTCCGGAGTCTG
GATCACAGTCATCTGGAAGAAGAACGATGGGAATCATAATCCGAAAACGGAATCGGGCGATTGTGTCTCATCAAACC
CACAAGCAGCCGCTGTCTGCGTCGCTCCGTGCGACTGCTGTTTATGGGATCGGGGTCTGCAGTGTCCTGAAGCATGA
TTTTAATAGCCCTTAACATTAACTTTCTGGTGCGATGCGCGCAGCAACGCATTCTGATTTCACTTAGATTACTACAG
TATGTACAGCACATTATCACAATATTGTTTAATAAACCATAATTAAAAGCGCTCCAGCCAAAACTCATATCTGATAC
AATCGCCCCTGCATGACCATCATACCAAATTTTAATATAAATTAAATGTCGTTCCCTCAAAAACACACTACCCACAT
ACATGATCTCTTTTGGCATGTGCATATTAACAATCTGTCTGTACCATGGACAACGTTGGTTAATCATGCAACCCAAT
ATAACCTTCCGGAACCACACTGCCAACACCGCTCCCCCAGCCATGCATTGAAGTGAACCCTGCTGATTACAATGACA
ATGAAGAACCCAATTCTCTCGACCATGAATCACTTGAGACTGAAAAATATCTATAGTAGCACAACAAAGACATAAAT
GCATGCATCTTCTCATAATTTTTAACTCATCTGGATTTAAAAACATATCCCAAGGAATGGGAAACTCTTGCAAAACA
GTAAAGCTGGCAGAACAAGGAAGACCACGAACACAACTTACACTATGCATAGTCATAGTATCACAATCTGGCAACAG
CGGGTGGTCTTCAGTCATAGAAGCTCGGGTTTCATTTTCCTCACATCGTGGTAACTGGGCTCTGGTGTAAGGGTGAT
GTCTGGCGCATGATGTCGAGCGTGCGCGCAACCTTGTCATAATGGAGTTGTTTCCTGACATTCTCGTATTTTGTATA
GCAAAATGCGGCCCTGGCACAACACACTCTTCTTCGTCTTCTATCCTGCCGCTTAGTGTGTTCCGTCTGATAATTCA
AGTACAGCCACACTCTTAAGTTGGTCAAAAGAATGCTGGCTTCAGTTGTAATCAAAACTCCATCATATTTAATTGTT
CTAAGGAAATCATCCACGGTAGCATATGCAAATCCCAACCAAGCAATGCAACTGGATTGTGTTTCAAGCAGCAGAGG
AGAGGGAAGAGACGGAAGAATCATGTTAATTTTTATTCCAAACGATCTCGCAGTACTTCAAATTGTAGATCGCGCAG
ATGGCATCTATCGCCCCCACTGTGTTGGTGAAAAAGCACAGCTAAATCAAAAGAAATGCGATTTTCAAGGTGCTCAA
CGGTGGCTTCCAACAAAGCCTCCACGCGCACATCCAAAAACAAAAGAATACCAAAAGAAGGAGCATTTTCTAACTCC
TCAAACATCATATTACATTCCTGCACCATTCCCAGATAATTTTCAGCTTTCCAGCCTTGAATTATTCGTGTCAGTTC
TTGTGGTAAATCCAAACCACACATTACAAACAGGTCACGGAGGGCGCCCTCCACCACCATTCTTAAACACACCCTCA
TAATGACAAAATATCTTGCTCCTGTGTCACCTGTAGCAAATTAAGAATGGCATCATCAATTGACATGCCCTTGGCTC
TAAGTTCTTCTCTAAGTTCTAGTTGTAAATACTCTCTCATATTATCACCAAACTGCTTAGCCAAAAGCCCCCCGGGA
ACAATAGCAGGGGACGCTACAGTGCAGTACAAGCGCAGACCTCCCCAATTGGCTCCAGCAAAAACAAGATTAGAATA
AGCATACTGGGAACCACCAGTAATATCATCAAAGTTGCTGGAAATATAATCAGGCAGAGTTTCTTGTAAAAATTGAA
TAAAAGAAAAATTTTCCAAAGAAACATTCAAAATCTCTGGGATGCAAATGCAATAGGTTACCGCGCTGCGCTCCAAC
ATTGTTAGTTTTGAATTAGTCTGCAAAATAAAAGAAACAAGCGTCATATCATAGTAGCCTGTCGAACAGGTGGATAA
ATCAGTCTTTCCATCACAAGACAAGCCACAGGGTCTCCAGCTCGACCCTCGTAAAACCTGTCATCGTGATTAAACAA
CAGCACCGAAAGTTCCTCGCGGTGGCCAGCATGAATAATTCTTGATGAAGCATATAATCCAGACATGTTAGCATCAG
TTAAAGAGAAAAAACAGCCAACATAGCCTCTGGGTATAATTATGCTTAATCTTAAGTATAGCAAAGCCACCCCTCGC
GGATACAAAGTAAAAGGCACAGGAGAATAAAAAATATAATTATTTCTCTGCCGCTGTTCAGGCAACGTCGCCCCCGG
TCCATCTAAATACACATACAAAGCCTCATCAGCCATGGCTTACCAGACAAAGAACAGCGGGCGCACAAAGCACAAGC
TCTAAAGAAGCTCTAAAGACACTCTCCAACCTCTCCACAATATATACACAAGCCCTAAACTGACGTAATGGGAGTAA
AGTATAAAAAATCCCGCCAAGCCCAACACACACCCCGAAACTGCGTCAGCAGGGAAAAATACAGTTTCACTTCCGCA
TTCCCAACAAGCGTAAGTTCCTCTTTCTCATGGTACGTCACATCCGATTAACTTGCAACGTCATTTTCCCACGGTCG
CACCGCCCCTTTTAGCCGTTCACCCCGCAGCCAATCACCACACAGCGCGCACTTTTTTAAATTACCTCATTTGCATA
TTGGCACCATTCCATCTATAAGGTATATTATATAGATAG

GenBank Accession No. AAW33370 (SEQ ID NO: 229)

MTKRVRLSDSFNPVYPYEDESTSQHPFINPGFISPNGFTQSPDGVLTLNCLTPLTTTGGPLQLKVGGGLIVDDTDGT
LQENIRATAPITKNNHSVELSIGNGLETQNNKLCAKLGNGLKFNNGDICIKDSINTLWTGIKPPPNCQIVENTDIND
GKLTLVLVKNGGLVNGYVSLVGVSDTVNQMFTQKSATIQLRLYFDSSGNLLTDESNLKIPLKNKSSTATSEAATSSK
AFMPSTTAYPFNTTTRDSENYIHGICYYMTSYDRSLVPLNISIMLNSRTISSNVAYAIQFEWNLNAKESPESNIATL
TTSPFFFSYIREDDN

GenBank Accession No. AAW33349 (SEQ ID NO: 230)

MMRRTVLGGAVVYPEGPPPSYESVMQQAAAATMQPPLEAPFVPPRYLAPTEGRNSIRYSELAPLYDTTRLYLVDNKS
ADIASLNYQNDHSNFLTTVVQNNDFTPTEASTQTINFDERSRWGGQLKTIMHTNMPNVNEYMFSNKFKARVMVSRKA
PEGVTVDDNYDHKQDILEYEWFEFTLPEGNFSATMTIDLMNNAIIDNYLEVGRQNGVLESDIGVKFDTRNFRLGWDP
ETKLIMPGVYTYEAFHPDIVLLPGCGVDFTESRLSNLLGIRKRHPFQEGFKILYEDLEGGNIPALLDVEAYENSKKE
QEAKTEAAKAAAIAKANIVVSDPVRVANAEEVRGDNYTASSVATDESLLAAVAETTETKLTIKPVEKDSKSRSYNVL
EDKVNTAYRSWYLSYNYGDPEKGVRSWTLLTTSDVTCGAEQVYWSLPDMMQDPVTFRSTRQVSNYPVVGAELMPVFS
KSFYNEQAVYSQQLRQSTSLTHVFNRFPENQILIRPPAPTITTVSENVPALTDHGTLPLRSSIRGVQRVTVTDARRR
TCPYVYKALGIVAPRVLSSRTF

GenBank Accession No. AAW33354 (SEQ ID NO: 231)

MATPSMLPQWAYMHIAGQDASEYLSPGLVQFARATDTYFNLGNKFRNPTVAPTHDVTTDRSQRLMLRFVPVDREDNT
YAYKVRYTLAVGDNRVLDMASTFFDIRGVLDRGPSFKPYSGTAYNSLAPKGAPNTSQWIAEGVKKEDGGSDEEEEKN
LTTYTFGNAPVKAEGGDITKDKGLPIGSEITDGEAKPIYADKLYQPEPQVGDETWTDTDGTTEKYGGRALKPETKMK
PCYGSFAKPTNVKGGQAKQKTTEQPQNQQVEYDIDMNFFDEASQKANFSPKIVMYAENVDLETPDTHVVYKPGTSEE
SSHANLGQQSMPNRPNYIGFRDNFIGLMYYNSTGNMGVLAGQASQLNAVVDLQDRNTELSYQLLLDSLGDRTRYFSM
WNQAVDSYDPDVRIIENHGVEDELPNYCFPLDGVGVPISSYKIIEPNGQGADWKEPDINGTSEIGQGNLFAMEINLQ
ANLWRSFLYSNVALYLPDSYKYTPANVTLPTNTNTYDYMNGRVVPPSLVDTYVNIGARWSLDAMDNVNPFNHHRNAG
LRYRSMLLGNGRYVPFHIQVPQKFFAVKNLLLLPGSYTYEWNFRKDVNMVLQSSLGNDLRVDGASISFTSINLYATF
FPMAHNTASTLEAMLRNDINDQSFNDYLSAANMLYPIPANATNVPISIPSRNWAAFRGWSFTRLKTKETPSLGSGFD
PYFVYSGSIPYLDGTFYLNHTFKKVSIMFDSSVSWPGNDRLLSPNEFEIKRTVDGEGYNVAQCNMTKDWFLVQMLAN
YNIGYQGFYVPEGYKDRMYSFFRNFQPMSRQVVDEINYKDYKAVAVPYQHNNSGFVGYMAPTMRQGQAYPANYPYPL
IGTTAVTSVTQKKFLCDRIMWRIPFSSNFMSMGALTDLGQNLLYANSAHALDMTFEVDPMDEPTLLYLLFEVFDVVR
VHQPHRGVIEAVYLRTPFSAGNATT

GenBank Accession No. AY737797 (SEQ ID NO: 205)

CATCATCAATAATATACCTTATAGATGGAATGGTGCCAATATGTAAATGAGGTGATTTTAAAAATTGTGGGGTGTGT
GGTGATTGGCTGTGGGGTTAACGGCTAAACGGGGCGGCGCGGCCGTGGGAAAATGACGTTTTGTGGGGGTGGAGTTT
TTTTGCAAGTTGTCGCGGGAAATGTGACGCATAAAAAGGCTTTTTTTCTCACGGAACTACTGACTTTTCCCACGGTA
TTTAACAGGAAATGAGGTAGTTTTGACCGGATGCAAGTGAAAATTGCTGATTTGCGCGCGAAAACTGAATGAGGAAG
TGTTTTTCTGAATAATGTGGTATTTATGGCAGGGTGGAGTATTTGTTCAGGGCCAGGTAGACTTTGACCCATTACGT
GGAGGTTTCGATTACCGTGTTTTTTACCTGAATTTCCGCGTACCGTGTCAAAGTCTTCTGTTTTTACGTAGGTGTCA
GCTGATCGCTACGGTATTTATACCTCAGGGTTTGTGTCAAGAGGCCACTCTTGAGTGCCAGCGAGAAGAGTTTTCTC
CTCTGCGCCGGCAGTTTAATAATAAAAAAATGAGAGATTTGCGATTTCTGCCTCAGGAAATAATTTCTGCTGAGACT
GGAAATGAAATACTGGAGCTTGTGGTGCACGCCCTGATGGGAGACGATCCGGAGCCACCTGTGCAGCTTTTTGAGCC
TCCTACGCTTCAGGAACTGTATGATTTAGAGGTAGAGGGATCGGAGGATTCTAATGAGGAAGCTGTGAATGGCTTTT
TTACCGATTCTATGCTTTTAGCTGCTAATGAAGGATTAGAATTAGATCCGCCTTTGGACACTTTCGATACTCCAGGG
GTGATTGTGGAAAGCGGTACAGGTGTAAGAAAATTACCTGATTTGGGTTCCGTGGACTGTGATTTGCACTGCTATGA
AGACGGGTTTCCTCCGAGTGATGAGGAGGACCATGAAAAGGAGCAGTCTATGCAGACTGCAGCGGGTGAGGGAGTGA
AGGCTGCCAGTGTTGGTTTTCAGTTGGATTGCCCGGAGCTTCCTGGACATGGCTGTAAGTCTTGTGAATTTCACAGG
AAAAATACTGGAGTAAAGGAACTGTTATGTTCGCTTTGTTATATGAGAGCGCACTGCCACTTTATTTACAGTAAGTG
TGTTTAAGTTAAAATTTAAAGGAATATGCTGTTTTTCACATGTATATTGAGTGGGAGTTTTGTGCTTCTTATTATAG
GTCCTGTGTCTGATGCTGATGAGTCACCATCTCCTGATTCTACTACCTCACCTCCTGAGATTCAAGCACCTGTTCCT
GTGGACGTGCGCAAGCCCATTCCTGTGAAGCTTAAGCCTGGGAAACGTCCAGCAGTGGAAAAACTTGAGGACTTGTT
ACAGGGTGGGGACGGACCTTTGGACTTGAGTACACGGAAACGGCCAAGACAATAAGTGTTCCATATCCGTGTTTACT
TAAGGTGACGTCAATATTTGTGTGAGAGTGCAATGTAATAAAAATATGTTAACTGTTCACTGGTTTTTATTGCTTTT
TGGGCGGGGACTCAGGTATATAAGTAGAAGCAGACCTGTATGGTTAGCTCATAGGAGCTGGCTTTCATCCATGGAGG
TTTGGGCCATTTTGGAAGACCTTAGAAAGACTAGGCAACTGTTAGAGGACGCTTCGGACGGAGTCTCCGGTTTTTGG
AGATTCTGGTTCGCTAGTGAATTAGCTAGGGTAGTTTTTAGGATAAAACAGGACTATAAAGAAGAATTTGAAAAGTT
GTTGGTAGATTGCCCAGGACTTTTTGAAGCTCTTAATTTGGGCCATCAAGTTCACTTTAAAGAAAAAGTTTTATCAG
TTTTAGACTTTTCAACCCCAGGTAGAACTGCCGCTGCTGTGGCTTTTCTTACTTTTATATTAGATAAATGGATCCCG
CAGACTCATTTCAGCAGGGGATACGTTTTGGATTTCGTAGCCACAGCATTGTGGAGAACATGGAAGGTTCGCAAGAT
GAGGACAATCTTAGGTTACTGGCCAGTGCAGCCTTTGGGTGTAGCGGGAATCCTGAGGCATCCACCGGTCATGCCAG
CGGTTCTGGAGGAGGAACAGCAAGAGGACAACCCGAGAGCCGGCCTGGACCCTCCAGTGGAGGAGGCGGAGTAGCTG
ACTTGTCTCCTGAACTGCAACGGGTGCTTACTGGATCTACGTCCACTGGACGGGATAGGGGCGTTAAGAGGGAGAGG
GCATCTAGTGGTACTGATGCTAGATCTGAGTTGGCTTTAAGTTTAATGAGTCGCAGACGTCCTGAAACCATTTGGTG
GCATGAGGTCCAGAAAGAGGGAAGGGATGAAGTTTCTGTATTGCAGGAGAAATATTCACTGGAACAGGTGAAAACAT
GTTGGTTGGAGCCTGAGGATGATTGGGAGGTGGCCATTAAAAATTATGCCAAGATAGCTTTGAGGCCTGATAAACAG
TATAAGATTACTAGACGGATTAATATCCGGAATGCTTGTTACATATCTGGAAATGGGGCTGAGGTGGTAATAGATAC
TCAAGACAAGGCAGTTATTAGATGCTGCATGATGGATATGTGGCCTGGAGTAGTCGGTATGGAAGCAGTAACTTTTG
TAAATGTTAAGTTTAGGGGAGATGGTTATAATGGAATAGTGTTTATGGCCAATACCAAACTTATATTGCATGGTTGT
AGCTTTTTTGGTTTCAACAATACCTGTGTAGATGCCTGGGGACAGGTTAGTGTACGGGGATGTAGTTTCTATGCGTG
TTGGATTGCCACAGCTGGCAGAACCAAGAGTCAATTGTCTCTGAAGAAATGCATATTCCAAAGATGTAACCTGGGCA
TTCTGAATGAAGGCGAAGCAAGGGTCCGCCACTGCGCTTCTACAGATACTGGATGTTTTATTTTAATTAAGGGCAAT
GCCAGCGTAAAGCATAACATGATTTGCGGTGCTTCCGATGAGAGGCCTTATCAAATGCTCACTTGTGCCGGTGGGCA
TTGTAATATGCTGGCTACTGTGCATATTGTTTCCCATCAACGCAAAAAATGGCCTGTTTTTGATCACAATGTGTTGA
CCAAGTGTACCATGCATGCAGGTGGGCGTAGAGGAATGTTTATGCCTTACCAGTGTAACATGAATCATGTGAAAGTG
TTGTTGGAACCAGATGCCTTTTCCAGAATGAGCCTAACAGGAATCTTTGACATGAACATGCAAATCTGGAAGATCCT
GAGGTATGATGATACGAGATCGAGGGTGCGCGCATGCGAATGCGGAGGCAAGCATGCCAGGTTCCAGCCGGTGTGTG
TAGATGTGACTGAAGATCTGAGACCGGATCATTTGGTTATTGCCCGCACTGGAGCAGAGTTCGGATCCAGTGGAGAA
GAAACTGACTAAGGTGAGTATTGGGAAAACTTGGGGTGGGGTTTTCAGATGGACAGATTGAGTAAAAATTTGTTTTT
TCTGTCTTTCAGCTGTCATGAGTGGAAACGCTTCTTTTAAGGGGGGAGTCTTCAGCCCTTATCTGACAGGGCGTCTC
CCATCCTGGGCAGGAGTTCGTCAGAATGTTATGGGATCTACTGTGGATGGAAGACCCGTCCAACCCGCCAATTCTTC
AACGCTGACCTATGCTACTTTAAGTTCTTCACCTTTGGACGCAGCTGCAGCCGCCGCCGCCGCCTCTGTTGCCGCTA
ACACTGTGCTTGGAATGGGTTACTATGGAAGTATCGTGGCTAATTCCACTTCCTCTAATAACCCTTCTACCCTGACT
CAGGACAAGTTACTTGTCCTTTTGGCCCAGCTGGAGGCTTTGACCCAACGTCTGGGTGAACTTTATCAGCAGGTGGC
CGAGTTGCGAGTACAAACTGAGTCTGCTGTCGGCACGGCAAAGTCTAAATAAAAAAAAATTCCACAATCAATGAATA
AATAAACGAGCTTGTTGTTGATTTAAAATCAAGTGTTTTTATTTCATTTTTCGCGCACGGTATGCCCTAGACCACCG
ATCTCGATCATTGAGAACACGGTGGATTTTTTCCAGAATCCTATAGAGGTGGGATTGAATGTTTAGATACATGGGCA
TTAGGCCATCTTTGGGGTGGAGATAGCTCCATTGAAGGGATTCATGCTCCGGGGTAGTGTTGTAAATCACCCAGTCA
TAACAAGGTCGCAGTGCATGGTGTTGCACAATATCTTTTAGAAGTAGGCTGATTGCCACAGATAAGCCCTTGGTGTA
GGTGTTTACAAACCGGTTGAGCTGGGAGGGGTGCATTCGGGGTGAAATTATGTGCATTTTGGATTGGATTTTTAAGT
TGGCAATATTGCCGCCAAGATCTCGTCTTGGGTTCATGTTATGAAGGACCACCAAGACGGTGTATCCGGTACATTTA
GGAAATTTATCGTGTAGCTTGGATGGAAAAGCGTGGAAAAATTTGGAGACACCCTTGTGTCCTCCGAGATTTTCCAT
GCACTCATCCATGATAATAGCAATGGGGCCGTGGGCAGCAGCGCGGGCAAACACGTTCCGTGGGTCTGACACATCAT
AGTTATGTTCCTGAGTTAAATCATCATAAGCCATTTTAATGAATTTGGGGCGGAGAGTACCCGATTGGGGTATGAAT
GTTCCTTCGGGCCCCGGAGCATAGTTCCCCTCACAGATTTGCATTTCCCAAGCTTTCAGTTCCGATGGTGGAATCAT
GTCCACCTGGGGGGCTATGAAGAACACCGTTTCTGGGGCGGGGGTGATTAGTTGGGATGATAGCAAGTTTCTGAGCA
ATTGAGATTTGCCACATCCGGTGGGGCCATAAATGATTCCGATTACAGGTTGCAGGTGGTAGTTTAGGGAACGGCAA
CTGCCGTCTTCTCGAAGCAAGGGGGCCACCTCGTTCATCATTTCCCTTACATGCATATTTTCCCGCACCAAATCCAT
TAGGAGGCGCTCTCCTCCTAGTGATAGAAGTTCTTGTAGTGAGGAAAAGTTTTTCAGCGGTTTTAGACCGTCAGCCA
TGGGCATTTTGGAGAGAGTTTGCTGCAAAAGTTCTAGTCTGTTCCACAGTTCAGTGATGTGTTCTATGGCATCTCGA
TCCAGCAGACCTCCTCGTTTCGCGGGTTTGGACGGCTCCTGGAGTAGGGTATGAGACGATGGGCGTCCAGCGCTGCC
AGGGTTCGGTCCTTCCAGGGTCTCAGTGTTCGAGTCAGGGTTGTTTCCGTCACAGTGAAGGGGTGTGCGCCTGCTTG
GGCGCTTGCCAGGGTGCGCTTCAGACTCATTCTGCTGGTGGAGAACTTCTGTCGCTTGGCGCCCTGTATGTCGGCCA
AGTAGCAGTTTACCATGAGTTCGTAGTTGAGCGCCTCGGCTGCGTGGCCTTTGGCGCGGAGCTTACCTTTGGAAGTT
TTCTTGCATACCGGGCAGTATAGGCATTTCAGCGCATACAGCTTGGGCGCAAGGAAAATGGATTCTGGGGAGTATGC
ATCTGCGCCGCAGGAGGCGCAAACAGTTTCACATTCCACCAGCCAGGTTAAATCCGGTTCATTGGGGTCAAAAACAA
GTTTTCCGCCATATTTTTTGATGCGTTTCTTACCTTTGGTCTCCATGAGTTCGTGTCCTCGTTGAGTGACAAACAGG
CTGTCCGTATCCCCGTAGACTGATTTTACAGGCCTCTTCTCCAGTGGAGTGCCTCGGTCTTCTTCGTACAGGAACTC
TGACCACTCTGATACAAAGGCGCGCGTCCAGGCCAGCACAAAGGAGGCTATGTGGGAGGGGTAGCGATCGTTGTCAA
CCAGGGGGTCCACCTTTTCCAAAGTATGCAAACACATGTCACCCTCTTCAACATCCAGGAATGTGATTGGCTTGTAG
GTGTATTTCACGTGACCTGGGGTCCCCGCTGGGGGGGTATAAAAGGGGGCGGTTCTTTGCTCTTCCTCACTGTCTTC
CGGATCGCTGTCCAGGAACGTCAGCTGTTGGGGTAGGTATTCCCTCTCGAAGGCGGGCATGACCTCTGCACTCAGGT
TGTCAGTTTCTAAGAACGAGGAGGATTTGATATTGACAGTGCCGGTTGAGATGCCTTTCATGAGGTTTTCGTCCATT
TGGTCAGAAAACACAATTTTTTTATTGTCAAGTTTGGTGGCAAATGATCCATACAGGGCGTTGGATAAAAGTTTGGC
AATGGATCGCATGGTTTGGTTCTTTTCCTTGTCCGCGCGCTCTTTGGCAGCGATGTTGAGTTGGACATACTCGCGTG
CTAGGCACTTCCATTCGGGGAAGATAGTTGTCAATTCATCTGGCACGATTCTCACTTGCCACCCTCGATTATGCAAG
GTAATTAAATCCACACTGGTGGCCACCTCGCCTCGAAGGGGTTCGTTGGTCCAACAGAGCCTACCTCCTTTCCTAGA
ACAGAAAGGGGGAAGTGGGTCTAGCATAAGTTCATCGGGAGGGTCTGCATCCATGGTAAAGATTCCCGGAAGTAAAT
CCTTATCAAAATAGCTGATGGGAGTGGGGTCATCTAAGGCCATTTGCCATTCTCGAGCTGCCAGTGCACGCTCATAT
GGGTTAAGGGGACTGCCCCAGGGCATGGGATGGGTGAGTGCAGAGGCATACATGCCACAGATGTCATAGACGTAGAT
GGGATCCTCAAAGATGCCTATATAGGTTGGATAGCATCGCCCCCCTCTGATACTTGCTCGCACATAGTCATATAGTT
CATGTGATGGCGCTAGCAACCCCGGACCCAAGTTGGTGCGATTGGGTTTTTCTGTTCTGTAGACAATCTGGCGAAAG
ATGGCGTGAGAATTGGAAGAGATGGTGGGTCTTTGAAAAATGTTGAAATGGGCATGAGGTAGACCTACAGAGTCTCT
GACAAAGTGGGCATAAGATTCTTGAAGCTTGGTTACCAGTTCGGCGGTGACAAGTACGTCTAGGGCGCAGTAGTCAA
GTGTTTCTTGAATGATGTCATAACCTGGTTGGTTTTTCTTTTCCCACAGTTCGCGGTTGAGAAGGTATTCTTCGCGA
TCCTTCCAGTACTCTTCTAGCGGAAACCCGTCTTTGTCTGCACGGTAAGATCCTAGCATGTAGAACTGATTAACTGC
CTTGTAAGGGCAGCAGCCCTTCTCTACGGGTAGAGAGTATGCTTGAGCAGCTTTTCGCAGCGAAGCGTGAGTAAGGG
CGAAGGTGTCTCTGACCATGACTTTGAGAAATTGGTATTTGAAGTCCATGTCGTCACAGGCTCCCTGTTCCCAGAGT
TGGAAGTCTACCCGTTTCTTGTAGGCGGGGTTGGGCAAAGCGAAAGTAACATCGTTGAAGAGAATCTTACCGGCTCT
GGGCATAAAATTGCGAGTGATGCGGAAAGGCTGTGGTACTTCCGCTCGATTGTTGATCACCTGGGCAGCTAGGACGA
TCTCGTCGAAACCGTTGATGTTGTGTCCTACGATGTATAATTCTATGAAACGCGGCGTGCCTTTGACGTGAGGTAGC
TTATTGAGCTCATCAAAGGTTAGGTCTGTAGGGTCAGATAAGGCGTAGTGTTCGAGAGCCCATTCGTGCAGGTGAGG
ATTTGCATGTAGGAATGATGACCAAAGATCCACCGCCAGTGCTGTTTGTAACTGGTCCCGATACTGACGAAAATGCT
GGCCAATTGCCATTTTTTCTGGAGTGACACAGTAGAAGGTTCTGGGGTCTTGTTGCCATCGATCCCACTTTAGTTTA
ATGGCTAGATCGTGGGCCATGTTGACGAGACGCTCTTCTCCTGAGAGTTTCATGACCAGCATGAAAGGAACTAGTTG
TTTGCCAAAGGACCCCATCCAGGTGTAAGTTTCCACATCGTAGGTCAGGAAGAGTCTTTCTGTGCGAGGATGAGAGC
CGATCGGGAAGAACTGGATTTCCTGCCACCAGTTGGAGGATTGGCTGTTGATGTGATGGAAGTAGAAGTTTCTGCGG
CGCGCCGAGCATTCGTGTTTGTGCTTGTACAGACGGCCGCAGTAGTCGCAGCGTTGCACGGGTTGTATCTCGTGAAT
GAGCTGTACCTGGCTTCCCTTGACGAGAAATTTCAGTGGGAAGCCGAGGCCTGGCGATTGTATCTCGTGCTCTTCTA
TATTCGCTGTATCGGCCTGTTCATCTTCTGTTTCGGTGGTGGTCATGCTGACGAGCCCCCGCGGGAGGCAAGTCCAG
ACCTCGGCGCGGGAGGGGCGGAGCTGAAGGACCAGAGCGCGCAGGCTGGAGCTGTCCAGAGTCCTGAGACGCTGCGG
ACTCAGGTTAGTAGGTAGGGACAGAAGATTAACTTGCATGATCTTTTCCAGGGCGTGCGGGAGGTTCAGATGGTACT
TGATTTCCACAGGTTCGTTTGTAGAGATGTCAATGGCTTGCAGGGTTCCGTGTCCTTTGGGCGCCACTACCGTACCT
TTGTTTTTTCTTTTGATCGGTGGTGGCTCTCTTGCTTCTTGCATGCTCAGAAGCGATGACGGGGACGCGCGCCGGGC
GGAAGCGGTTGTTCCGGACCCGGAGGCATGGCTGGTAGTGGCACGTCGGCGCCGCGCACGGGCAGGTTCTGGTACTG
CGCTCTGAGAAGACTTGCGTGCGCCACCACGCGTCGATTGACGTCTTGTATCTGACGTCTCTGGGTGAAAGCTACCG
GCCCCGTGAGCTTGAACCTGAAAGAGAGTTCAACAGAATCAATTTCGGTATCGTTAACGGCAGCTTGTCTCAGTATT
TCTTGTACGTCACCAGAGTTGTCCTGGTAGGCGATCTCCGCCATGAACTGCTCGATTTCTTCCTCCTGAAGATCTCC
GCGACCCGCTCTCTCGACGGTGGCCGCGAGGTCATTGGAGATACGGCCCATGAGTTGGGAGAATGCAGTCATGCCCG
CCTCGTTCCAGACGCGGCTGTAAACCACGGCCCCCTCGGAGTCTCTTGCGCGCATCACCACCTGAGCGAGGTTAAGC
TCCACGTGTCTGGTGAAGACCGCATAGTTGCATAGGCGCTGAAAAAGGTAGTTGAGTGTGGTGGCAATGTGTTCGGC
GACGAAGAAATACATGATCCATCGTCTCAGCGGCATTTCGCTGACATCGCCCAGAGCTTCCAAGCGCTCCATGGCCT
CGTAGAAGTCCACGGCAAAATTAAAAAACTGGGAGTTTCGCGCGGACACGGTCAATTCCTCCTCGAGAAGACGGATG
AGTTCGGCTATGGTGGCCCGTACTTCGCGTTCGAAGGCTCCCGGGATCTCTTCTTCCTCTTCTATCTCTTCTTCCAC
TAACATCTCTTCTTCGTCTTCAGGCGGGGGCGGAGGGGGCACACGGCGACGTCGACGGCGCACGGGCAAACGGTCGA
TGAATCGTTCAATGACCTCTCCGCGGCGGCGGCGCATGGTTTCAGTGACGGCGCGGCCGTTCTCGCGCGGTCGCAGA
GTAAAAACACCGCCGCGCATCTCCTTAAAGTGGTGACTGGGAGGTTCTCCGTTTGGGAGGGAGAGGGCGCTGATTAT
ACATTTTATTAATTGGCCCGTAGGGACTGCGCGCAGAGATCTGATCGTGTCAAGATCCACGGGATCTGAAAACCTTT
CGACGAAAGCGTCTAACCAGTCACAGTCACAAGGTAGGCTGAGTACGGCTTCTTGTGGGCGGGGGTGGTTATGTGTT
CGGTCTGGGTCTTCTGTTTCTTCTTCATCTCGGGAAGGTGAGACGATGCTGCTGGTGATGAAATTAAAGTAGGCAGT
TCTAAGACGGCGGATGGTGGCGAGGAGCACCAGGTCTTTGGGTCCGGCTTGCTGGATACGCAGGCGATTGGCCATTC
CCCAAGCATTATCCTGACATCTAGCAAGATCTTTGTAGTAGTCTTGCATGAGCCGTTCTACGGGCACTTCTTCCTCA
CCCGTTCTGCCATGCATACGTGTGAGTCCAAACCCGCGCATTGGTTGTACCAGTGCCAAGTCAGCTACGACTCTTTC
GGCGAGGATGGCTTGCTGTACTTGGGTGAGGGTGGCTTGAAAGTCATCAAAATCCACAAAGCGGTGGTAAGCCCCGG
TATTAATGGTGTAAGCACAGTTGGCCATGACTGACCAGTTAACTGTCTGGTGACCAGGGCGCACGAGCTCGGTGTAT
TTAAGGCGCGAATAGGCGCGGGTGTCAAAGATGTAATCGTTGCAGGTGCGCACCAGATACTGGTAACCTATAAGAAA
ATGCGGCGGTGGTTGGCGGTAGAGAGGCCATCGTTCTGTAGCTGGAGCGCCGGGGGCGAGGTCTTCCAACATAAGGC
GGTGATAGCCGTAGATGTACCTGGACATCCAGGTGATTCCTGCGGCGGTAGTAGAAGCCCGAGGAAACTCGCGTACG
CGGTTCCAAATGTTGCGTAGCGGCATGAAGTAGTTCATTGTAGGCACGGTTTGACCAGTGAGGCGCGCGCAGTCATT
GATGCTCTATAGACACGGAGAAAATGAAAGCGTTCAGCGACTCGACTCCGTAGCCTGGAGGAACGTGAACGGGTTGG
GTCGCGGTGTACCCCGGTTCGAGACTTGTACTCGAGCCGGCCGGAGCCGCGGCTAACGTGGTATTGGCACTCCCGTC
TCGACCCAGCCTACAAAAATCCAGGATACGGAATCGAGTCGTTTTGCTGGTTGCCGAATGGCAGGGAAGTGAGTCCT
ATTTTTTTTTTTTGCCGCTCAGATGCATCCCGTGCTGCGACAGATGCGTCCCCAACAACAGCCCCCCTCGCAGCAGC
AGCAACCACAAAAGGCTGTCCCTGCAACTACTGCAACTGCCGCTGTGAGCGGTGCGGGACAGCCCGCCTATGATCTG
GACTTGGAAGAGGGCGAAGGACTGGCACGTCTAGGTGCGCCTTCGCCCGAGCGGCATCCGCGAGTTCAACTGAAAAA
AGATTCTCGCGAGGCGTATGTGCCCCAACAGAACCTATTTAGAGACAGAAGCGGCGAGGAGCCGGAGGAGATGCGAG
CTTCCCGCTTTAACGCGGGTCGTGAGCTGCGTCACGGTTTGGACAGAAGACGAGTGTTGCGGGACGAGGATTTCGAA
GTTGATGAAGTGACAGGGATCAGTCCTGCCAGGGCACACGTGGCTGCAGCCAACCTTGTATCGGCTTACGAACAGAC
AGTAAAGGAAGAGCGTAATTTCCAAAAGTCTTTTAATAATCATGTGCGAACCCTCATTGCCCGCGAAGAAGTCACCC
TTGGTTTGATGCATTTGTGGGATTTGATGGAAGCTATCATTCAGAACCCTACTAGCAAACCTCTGACCGCACAGCTG
TTTCTGGTGGTGCAACACAGCAGAGACAATGAGGCTTTCAGAGAGGCGCTGCTCAACATCACCGAACCCGAGGGGAG
ATGGTTGTATGATCTTATCAACATTCTACAGAGTATCATAGTGCAGGAGCGGAGCCTGGGCCTGGCCGAGAAGGTGG
CTGCCATCAATTACTCGGTTTTGAGCTTGGGAAAGTATTACGCTCGCAAGATCTACAAGACTCCATACGTTCCCATA
GACAAGGAGGTGAAGATAGATGGGTTCTACATGCGCATGACGCTGAAGGTGTTGACCCTGAGCGATGATCTTGGGGT
GTACCGCAATGACAGAATGCATCGCGCGGTGAGCGCCAGCAGGAGGCGCGAGTTAAGCGACAGGGAACTGATGCACA
GTTTGCAAAGAGCTCTAACTGGAGCTGGAACCGAGGGTGAGAATTACTTTGATATGGGAGCTGACTTGCAGTGGCAG
CCTAGTCGCAGGGCTCTGAACGCCGCGACGGCAGGATGTGAGCTTCCTTACATAGAAGAGGCGGATGAAGGCGAGGA
GGAAGAGGGCGAGTACTTGGAAGACTGATGGCACAACCCGTGTTTTTTGCTAGATGGAACAGCAAGCACCGGATCCC
GCAATGCGGGCGGCGCTGCAGAGCCAGCCGTCCGGCATTAACTCCTCGGACGATTGGACCCAGGCCATGCAACGTAT
CATGGCGTTGACGACTCGCAACCCCGAAGCCTTTAGACAGCAACCCCAGGCCAACCGTCTATCGGCCATCATGGAAG
CTGTAGTGCCTTCCCGCTCTAATCCCACTCATGAGAAGGTCCTGGCCATCGTGAACGCGTTGGTGGAGAACAAAGCT
ATTCGTCCAGATGAGGCCGGACTGGTATACAACGCTCTCTTAGAACGCGTGGCTCGCTACAACAGTAGCAATGTGCA
AACCAATTTGGACCGTATGATAACAGATGTACGCGAAGCCGTGTCTCAGCGCGAAAGGTTCCAGCGCGATGCCAACC
TGGGTTCGCTGGTGGCGTTAAATGCTTTCTTGAGTACTCAGCCTGCTAATGTGCCGCGTGGTCAACAGGATTATACT
AACTTTTTAAGTGCTTTGAGACTGATGGTATCAGAAGTACCTCAGAGCGAAGTATATCAGTCCGGTCCTGATTACTT
CTTTCAGACTAGCAGACAGGGCTTGCAGACGGTAAATCTGAGCCAAGCTTTTAAAAACCTTAAAGGTTTGTGGGGAG
TGCATGCCCCGGTAGGAGAAAGAGCAACCGTGTCTAGCTTGTTAACTCCGAACTCCCGCCTATTATTACTGTTGGTA
GCTCCTTTCACCGACAGCGGTAGCATCGACCGTAATTCCTATTTGGGTTACCTACTAAACCTGTATCGCGAAGCCAT
AGGGCAAAGTCAGGTGGACGAGCAGACCTATCAAGAAATTACCCAAGTCAGTCGCGCTTTGGGACAGGAAGACACTG
GCAGTTTGGAAGCCACTCTGAACTTCTTGCTTACCAATCGGTCTCAAAAGATCCCTCCTCAATATGCTCTTACTGCG
GAGGAGGAGAGGATCCTTAGATATGTGCAGCAGAGCGTGGGATTGTTTCTGATGCAAGAGGGGGCAACTCCGACTGC
AGCACTGGACATGACAGCGCGAAATATGGAGCCCAGCATGTATGCCAGTAACCGACCTTTCATTAACAAACTGCTGG
ACTACTTGCACAGAGCTGCCGCTATGAACTCTGATTATTTCACCAATGCCATCTTAAACCCGCACTGGCTGCCCCCA
CCTGGTTTCTACACGGGCGAATATGACATGCCCGACCCTAATGACGGATTTCTGTGGGACGACGTGGACAGCGATGT
TTTTTCACCTCTTTCTGATCATCGCACGTGGAAAAAGGAAGGCGGCGATAGAATGCATTCTTCTGCATCGCTGTCCG
GGGTCATTGGTGCTACCGCGGCTGAGCCCGAGTCTGCAAGTCCTTTTCCTAGTCTACCCTTTTCTCTACACAGTGTA
CGTAGCAGCGAAGTGGGTAGAATAAGTCGCCCGAGTTTAATGGGCGAAGAGGAGTACCTAAACGATTCCTTGCTCAG
ACCGGCAAGAGAAAAAAATTTCCCAAACAATGGAATAGAAAGTTTGGTGGATAAAATGAGTAGATGGAAGACTTATG
CTCAGGATCACAGAGACGAGCCTGGGATCATGGGGACTACAAGTAGAGCGAGCCGTAGACGCCAGCGCCATGACAGA
CAGAGGGGTCTTGTGTGGGACGATGAGGATTCGGCCGATGATAGCAGCGTATTGGACTTGGGTGGGAGAGGAAGGGG
CAACCCGTTTGCTCATTTGCGCCCTCGCTTGGGTGGTATGTTGTAAAAAAAAATAAAAAAGAAAAAACTCACCAAGG
CCATGGCGACGAGCGTACGTTCGTTCTTCTTTATTATCTGTGTCTAGTATAATGAGGCGAGTCGTGCTAGGCGGAGC
GGTGGTGTATCCGGAGGGTCCTCCTCCTTCGTACGAGAGCGTGATGCAGCAGCAGCAGGCGACGGCGGTGATGCAAT
CCCCACTGGAGGCTCCCTTTGTGCCTCCGCGATACCTGGCACCTACGGAGGGCAGAAACAGCATTCGTTACTCGGAA
CTGGCACCTCAGTACGATACCACCAGGTTGTATCTGGTGGACAACAAGTCGGCGGACATTGCTTCTCTGAACTATCA
GAATGACCACAGCAACTTCTTGACCACGGTGGTGCAAAACAATGACTTTACCCCTACGGAAGCCAGCACCCAGACCA
TTAACTTTGATGAACGATCGCGGTGGGGCGGTCAGCTAAAAACCATCATGCATACTAACATGCCCAACGTGAACGAG
TATATGTTTAGTAACAAGTTCAAAGCGCGTGTGATGGTGTCCAGAAAACCTCCTGAGGGTGTTAGAGTAGACGATAA
TTATGATCATAAGCAAGATATTCTAAAATACGAGTGGTTCGAGTTTACTTTGCCAGAAGGCAACTTTTCGGTCACTA
TGACTATCGACTTGATGAACAATGCCATCATAGACAATTACTTGAAAGTGGGCAGACAGAATGGAGTGTTGGAAAGT
GACATTGGTGTTAAGTTCGACACTAGGAACTTCAAGTTGGGATGGGATCCAGAAACTAAGTTGATCATGCCTGGGGT
TTACACCTATGAGGCCTTCCATCCTGACATCGTATTGCTGCCTGGCTGCGGAGTGGACTTTACCGAAAGCCGTCTGA
GCAACCTTCTTGGCATTAGAAAGAAACACCCATTCCAAGAGGGTTTTAAGATCTTGTATGAGGATTTAGAAGGAGGA
AATATTCCAGCCCTTTTGGATGTAGATGCTTATGAGAACAGCAAGAAAGATCAAAAAGCCAAAATAGAAGCTGCTGC
AGAAGCTAAAGCAAACATAGTTGCCAACGATCCGGTAAGGGTGGCTAACGCTAGTGAAATCAGGGGAGACAGTTTTG
CCGCAACATCCGTTCCGACTAAAGAATCATTATTGGATGATGTGTCTCAAAACATAGAGTTAAAACTCACTATTAAG
CCTGTGGAAAAAGATGGCAAAAACAGAAGTTACAATGTGTTGGAAGATAAAATCAACACGGCCTATCGCAGTTGGTA
CCTTTCGTACAATTATGGCGACCCCGAAAAAGGAGTGCGTTCCTGGACATTGCTCACCACCTCAGATGTCACCTGCG
GAGCGGAGCAGGTCTACTGGTCGCTTCCAGACATGATGCAGGATCCTGTCACTTTCCGCTCCACTAGACAAGTCAGT
AACTACCCTGTGGTGGGTGCAGAGCTTATGCCCGTCTTTTCAAAGAGCTTCTACAACGAACAAGCTGTGTACTCCCA
GCAGCTCCGCCAGTCCACCTCGCTTACGCACGTCTTCAACCGCTTTCCTGAGAACCAGATTTTAATCCGTCCGCCGG
CGCCCACAATTACCACCGTCAGTGAAAACGTTCCTGCTCTCACAGATCACGGGACCCTGCCGTTGCGCAGCAGTATC
CGGGGAGTCCAACGTGTGACCGTTACTGACGCCAGACGCCGCACCTGTCCCTACGTGTACAAGGCACTGGGCATAGT
CGCACCGCGCGTCCTTTCAAGCCGCACTTTCTAAAAAAAAAAAAAAAATGTCCGTTCTTATCTCGCCCAGTAATAAC
ACCGGTTGGGGTCTGCGCGCTCCCAGCAAGATGTACGGAGGCGCACGCAAACGTTCTACCCAACATCCCGTGCGTGT
TCGCGGGCATTTTCGCGCTCCATGGGGTGCCCTCAAGGGCCGCACTCGCGTTCGAACCACCGTCGATGATGTAATCG
ATCAGGTGGTTGCCGACGCCCGTAATTATACTCCTACTGCGCCTACATCTACTGTGGACGCAGTTATTGACAGTGTA
GTGGCTGACGCTCGCAACTATGCTCGACGTAAGAGCCGGCGAAGGCGCATTGCCAGACGTCACCGAGCTACCACTGC
CATGCGAGCAGCAAGAGCTCTGCTACGAAGAGCTAGACGCGTGGGGCGAAGAGCCATGCTTAGGGCGGCCAGACGTG
CAGCTTCGGGCGCCAGCGCCGGCAGGTCCCGCAGGCAAGCAGCCGCTGTCGCAGCGGCGACTATTGCCGACATGGCC
CAATCGCGAAGAGGCAATGTATACTGGGTGCGTGACGCTGCCACCGGTCAACGTGTACCCGTGCGCACCCGTCCCCC
TCGCACTTAGAAGATACTGAGCAGTCTCCGATGTTGTGTCCCAGCGGCGAGGATGTCCAAGCGCAAATACAAGGAAG
AAATGCTGCAGGTTATCGCACCTGAAGTCTACGGCCAACCGTTGAAGGATGAAAAAAAACCCCGCAAAATCAAGCGG
GTAAAAAAGGACAAAAAAGAAGAGGAAGATGGCGATGATGGGCTGGCGGAGTTTGTGCGCGAGTTTGCCCCACGGCG
ACGCGTGCAATGGCGTGGGCGCAAAGTTCGACATGTGTTGAGACCTGGAACTTCGGTGGTCTTTACACCCGGCGAGC
GTTCAAGCGCTACTTTTAAGCGTTCCTATGATGAGGTGTACGGGGATGATGATATTCTTGAGCAGGCAGCTGACCGA
TTAGGCGAGTTTGCTTATGGCAAGCGTAGTAGAATAAATCCCAAGGATGAAACAGTGTCCATACCCTTGGATCATGG
AAATCCCACCCCTAGTCTTAAACCGGTCACTTTGCAGCAAGTGTTACCCGTAACTCCGCGAACAGGTGTTAAACGCG
AAGGTGAAGATTTGTATCCCACTATGCAACTGATGGTGCCCAAACGCCAGAAGTTGGAGGACGTTTTGGAGAAAGTA
AAAGTGGATCCAGATATTCAACCTGAGGTTAAAGTGAGACCCATTAAGCAGGTAGCGCCTGGTCTGGGAGTACAAAC
TGTAGACATTAAAATTCCCACTGAAAGTATGGAAGTGCAAACTGAACCCGCAAAGCCTACTGCCACCTCCACTGAAG
TGCAAACGGACCCATGGATGCCCATGCCTATTACAACTGACGCCGTCGGTCCCACTCGAAGATCCCGACGAAAGTAC
GGTCCAGCAAGTCTGTTGATGCCCAACTATGTCGTACACCCATCTATTATTCCTACTCCTGGTTACCGAGGCACTCG
CTACTATCGCAGCCGAAACAGTACTTCCCGCCGTCGCCGCAAGACACCTGCAAATCGCAGTCGTCGCCGTAGACGCA
CAAGCAAACCGATTCCCGGCGCCCTGGTGCGGCAAGTGTACCGCAATGGTAGTGCGGAACCTTTGACACTGCCGCGT
GCGCGTTACCATCCTAGTATCATCACTTAATCAATGTTGCCGCTGCCTCCTTGCAGATATGGCCCTCACTTGTCGCC
TTCGCGTTCCCATCACTGGTTACCGAGGAAGAAACTCGCGCCGTAGAAGAGGGATGTTGGGGCGCGGAATGCGACGC
TACAGGCGACGGCGTGCTATCCGCAAGCAATTGCGGGGTGGTTTTTTGCCAGCCTTAATTCCAATTATCGCTGCTGC
GATTGGCGCAATACCAGGCATAGCTTCCGTGGCGGTTCAGGCCTCGCAACGACATTGACATTGGAAAAAAAAAAAAC
GTATAAATAAAAAATACAATGGACTCTGACACTCCTGGTACTGTGACTATGTTTTCTTAGAGATGGAAGACATCAAT
TTTTCATCCTTGGCTCCGCGACACGGCACGAAGCCGTACATGGGCACCTGGAGCGACATCGGCACGAGCCAACTGAA
CGGGGGCGCCTTCAATTGGAGCAGTATCTGGAGCGGGCTTAAAAATTTTGGCTCAACCATAAAAACATACGGGAACA
AAGCTTGGAACAGCAGTACAGGACAGGCGCTTAGAAATAAACTTAAAGACCAGAACTTCCAACAAAAAGTAGTCGAT
GGGATAGCTTCCGGTATCAATGGAGTGGTAGATTTGGCTAACCAGGCTGTGCAGAAAAAGATAAACAGTCGTTTGGA
CCCGCCGCCAGCAACCCCAGGTGAAATGCAAGTGGAGGAAGAAATTCCTCCGCCAGAAAAACGAGGCGACAAGCGTC
CGCGTCCCGATTTGGAAGAGACGCTGGTGACGCGCGTAGATGAACCGCCTTCTTATGAGGAAGCAACGAAGCTTGGA
ATGCCCACCACTAGACCGATAGCCCCTATGGCCACCGGGGTGATGAAACCTTCTCAGTTGCATCGACCCGTCACCTT
GGATTTGCCCCCTCCTCCTGCTGCTACTGCTGTACCCGCTTCTAAGCCTGTCGCTGCCCCGAAACCAGTCGCCGTAG
CCAGGTCACGTCCCGGGGGCGCTCCTCGTCCAAATGCACACTGGCAAAATACTCTGAACAGCATCGTGGGTCTAGGC
GTGCAAAGTGTAAAACGCCGTCGCTGCTTTTAATTAAATATGGAGTAGCGCTTAACTTGCCTATCTGTGTATATGTG
TCATTACACGCCGTCACAGCATCAGAGGAAAAAAGGAAGAGGTCGTGCGTCGACGCTGAGTTACTTTCAAGATGGCC
ACCCCATCGATGCTGCCCCAATGGGCATACATGCACATCGCCGGACAGGATGCTTCGGAGTACCTGAGTCCGGGTCT
GGTGCAGTTCGCCCGCGCCACAGACACCTACTTCAATCTGGGAAATAAGTTTAGAAATCCTACCGTAGCGCCGACCC
ACGATGTGACCACCGATCGTAGCCAGCGGCTCATGTTGCGCTTCGTGCCCGTTGACCGGGAGGACAATACATACTCT
TACAAAGTGCGGTACACCCTGGCCGTGGGCGACAACAGAGTGCTGGATATGGCCAGCACGTTCTTTGACATTAGGGG
CGTGTTGGACAGAGGTCCCAGTTTTAAACCCTATTCTGGTACGGCTTACAACTCCCTGGCTCCTAAAGGCGCTCCAA
ATGCATCTCAGTGGTTGGATAAGGGAGTTACAAGCACTGGCCTAGTGGACGACGGCAATACTGATGATGGGGAAGAA
GCCAAAAAAGCAACATACACTTTTGGTAATGCTCCAGTAAAAGCCGAGGCTGAAATCACAAAAGACGGATTGCCGGT
GGGCTTGGAAGTTTCAACTGAAGGTCCTAAACCAATCTATGCTGATAAGCTTTATCAGCCAGAACCTCAAGTGGGAG
ACGAAACTTGGACTGACCTAGACGGAAAAACCGAAGAGTATGGAGGGAGGGTTCTTAAACCTGAAACTAAAATGAAA
CCCTGCTACGGATCTTTTGCTAAACCTACTAATATTAAAGGAGGTCAGGCAAAGGTAAAACCAAAAGAAGACGATGG
CACTAACAACATCGAGTATGACATTGACATGAACTTCTTTGACTTAAGATCACAAAGATCAGAACTCAAACCTAAAA
TTGTAATGTATGCAGAAAATGTGGACCTGGAATGTCCAGATACTCATGTTGTGTACAAACCTGGAGTTTCAGATGCT
AGTTCTGAGACCAATCTTGGACAACAGTCTATGCCCAACAGACCCAACTACATTGGCTTCAGAGATAACTTCATCGG
ACTTATGTACTATAACAGTACTGGCAACATGGGGGTACTGGCTGGCCAAGCGTCTCAGTTGAATGCAGTGGTTGACT
TGCAGGACAGAAACACAGAACTGTCTTACCAACTCTTGCTTGACTCTCTGGGCGACAGAACCAGATACTTTAGCATG
TGGAATCAGGCTGTGGACAGTTATGATCCTGATGTACGTGTTATTGAAAATCATGGTGTGGAAGATGAACTTCCCAA
CTATTGTTTTCCGTTGGATGGTGTCGGTCCGCGAACAGATAGTTACAAGGAGATTAAGCCAAATGGAGACCAATCTA
CTTGGACAAATGTAGACCCAACTGGCAGCAGTGAACTTGCTAAGGGAAATCCATTTGCCATGGAAATTAACCTTCAA
GCCAATCTATGGCGAAGTTTCCTTTATTCCAATGTGGCTCTATATCTCCCAGACTCGTACAAATACACCCCGTCCAA
TGTCACTCTTCCAGAAAACAAAAACACCTACGACTACATGAACGGGCGGGTGGTGCCGCCATCTCTAGTAGACACCT
ATGTGAACATTGGTGCCAGGTGGTCTCTGGATGCCATGGACAATGTCAACCCATTCAACCACCACCGTAACGCTGGC
TTGCGTTACCGATCCATGCTTCTGGGTAACGGACGTTATGTGCCTTTCCACATACAAGTGCCTCAAAAATTCTTCGC
TGTTAAAAACCTGCTGCTTCTCCCAGGCTCCTACACTTATGAGTGGAACTTTAGGAAGGATGTAAACATGGTTCTAC
AGAGTTCCCTCGGTAACGACCTACGGGTAGATGGCGCCAGCATCAGTTTTACGAGCATCAACCTCTATGCTACTTTT
TTCCCCATGGCTCACAACACCGCTTCCACCCTTGAAGCCATGCTGCGGAATGACACCAATGATCAGTCATTCAACGA
CTACCTATCTGCAGCTAACATGCTCTACCCCATTCCTGCCAATGCAACCAATATTCCCATTTCCATTCCTTCTCGCA
ACTGGGCGGCTTTCAGAGGCTGGTCATTTACCAGACTGAAAACCAAAGAAACTCCCTCTTTGGGGTCTGGATTTGAC
CCCTACTTCGTCTATTCTGGTTCTATTCCCTACCTGGATGGTACCTTCTACCTGAACCACACTTTTAAGAAGGTTTC
CATCATGTTTGACTCTTCAGTGAGCTGGCCTGGAAATGACAGGTTACTATCTCCTAACGAATTTGAAATAAAGCGCA
CTGTGGATGGCGAAGGCTACAACGTAGCCCAATGCAACATGACCAAAGACTGGTTCTTGGTACAGATGCTCGCCAAC
TACAACATCGGCTATCAGGGCTTCTACATTCCAGAAGGATACAAAGATCGCATGTATTCATTTTTCAGAAACTTCCA
GCCCATGAGCAGGCAGGTGGTTGATGAGGTCAATTACAAAGACTTCAAGGCCGTCGCCATACCCTACCAACACAACA
ACTCTGGCTTTGTGGGTTACATGGCTCCGACCATGCGTCAAGGTCAACCCTATCCCGCTAACTATCCCTATCCACTC
ATTGGAACAACTGCCGTAAATAGTGTTACGCAGAAAAAGTTCTTGTGTGACAGAACCATGTGGCGCATACCGTTCTC
AAGCAACTTCATGTCTATGGGAGCCCTTACAGACTTGGGACAGAACATGCTCTATGCCAACTCAGCTCATGCTCTGG
ACATGACCTTTGAGGTGGATCCCATGGATGAGCCCACCCTGCTTTATCTTCTCTTCGAAGTTTTCGACGTGGTCAGA
GTGCATCAGCCACACCGCGGCATCATCGAGGCAGTCTACCTGCGTACACCGTTCTCGGCCGGTAACGCTACCACGTA
AGAAGCTTCTTGCTTCTTGCAAACAGCAGCTGCAACCATGGCCTGCGGATCCCAAAACGGCTCCAGCGAGCAAGAGC
TCAGAGCCATTGTCCAAGACCTGGGTTGCGGACCATATTTTTTGGGAACCTTTGATAAGCGCTTCCCGGGGTTCATG
GCCCCCGATAAGCTCGCCTGTGCCATTGTAAATACGGCCGGACGTGAGACGGGGGGAGAGCACTGGTTGGCTTTCGG
TTGGAACCCACGTTCTAACACCTGCTACCTTTTTGATCCTTTTGGATTCTCGGATGATCGTCTCAAACAGATTTACC
AGTTTGAATATGAGGGTCTCCTGCGCCGCAGCGCTCTTGCTACCAAGGACCGGTGTATTACGCTGGAAAAATCTACC
CAGACCGTGCAGGGCCCCCGTTCTGCCGCCTGCGGACTTTTCTGCTGCATGTTCCTTCATGCCTTTGTGCACTGGCC
TGACCGTCCCATGGACGGAAACCCCACCATGAAATTGCTAACTGGAGTGCCAAACAACATGCTTCATTCTCCTAAAG
TCCAGCCCACCCTGTGTGACAATCAAAAAGCACTCTACCATTTTCTCAATACCCATTCGCCTTATTTTCGCTCTCAT
CGTACACACATCGAAAGGGCCACTGCGTTCGACCGTATGGATGTGCAATAATGATTCATGTAAACAACGTGTTCAAT
AAACAGCACTTTATTTTTTACATGTATCGAGGCTCTGGATTACTTATTTATTTACAAGTCGAATGGGTTCTGACGAG
AATCAGAATGACCCGCAGGCAGTGATACGTTGCGGAACTGATACTTGGGTTGCCACTTGAATTCGGGAATCACCAAC
TTGGGAACCGGTATATCGGGCAGGATGTCACTCCACAGCTTTCTGGTCAGCTGCAAAGCTCCCAGCAGGTCAGGAGC
CGAAATCTTGAAATCACAATTAGGACCAGTGCTCTGAGCGCGAGAGTTGCGGTACACCGGATTGCAGCACTGAAACA
CCATCAGCGACGGATGTCTTACGCTTGCCAGCACGGTGGGATCTGCAATCATGCCCACATCCAGATCTTCAGCATTG
GCAATGCTGAACGGGGTCATCTTGCAGGTCTGCCTACCCATGGCGGGCACCCAATTAGGCTTGTGGTTACAATCGCA
GTGCAGGGGGATCAGTATCATCTTGGCCTGATCCTGTCTGATTCCTGGATACACGGCTCTCATGAAAGCATCATATT
GCTTGAAAGCCTGCTGGGCTTTACTACCCTCGGTATAAAACATCCCGCAGGACCTGCTCGAAAACTGGTTAGCTGCG
CAGCCGGCATCATTCACACAGCAGCGGGCGTCATTGTTGGCTATTTGCACCACACTTCTGCCCCAGCGGTTTTGGGT
GATTTTGGTTCGCTCGGGATTCTCCTTCAAGGCTCGTTGTCCGTTCTCGCTGGCCACATCCATCTCGATAATCTGCT
CCTTCTGAATCATAATATTGCCATGCAAGCACTTCAGCTTGCCCTCATAATCATTGCAGCCATGAGGCCACAACGCA
CAGCCTGTACATTCCCAATTATGGTGGGCGATCTGAGAAAAAGAATGTATCATTCCCTGCAGAAATCTTCCCATCAT
CGTGCTCAGTGTCTTGTGACTAGTGAAAGTTAACTGGATGCCTCGGTGCTCCTCGTTCACGTACTGGTGACAGATGC
GCTTGTATTGTTCGTGCTGCTCAGGCATTAGTTTAAAAGAGGTTCTAAGTTCGTTATCCAGCCTGTACTTCTCCATC
AGCAGACACATCACTTCCATGCCTTTCTCCCAAGCAGACACCAGGGGCAAGCTAATCGGATTCTTAACAGTGCAGGC
AGCAGCTCCTTTAGCCAGAGGGTCATCTTTGGCGATCTTCTCAATGCTTCTTTTGCCATCCTTCTCAACGATGCGCA
CGGGCGGGTAGCTGAAACCCACTGCTACAAGTTGCGCCTCTTCTCTTTCTTCTTCGCTGTCTTGACTGATGTCTTGC
ATGGGGACATGTTTGGTCTTCCTTGGCTTCTTTTTCGGGGGTATCGGAGGAGGAGGACTGTCGCTCCGTTCCGGAGA
CAGGGAGGATTGTGACGTTTCGCTCACCATTACCAACTGACTGTCGGTAGAAGAACCTGACCCCACACGGCGACAGG
TGTTTCTCTTCGGGGGCAGAGGTGGAGGCGATTGCGAAGGGCTGCGGTCCGACCTGGAAGGCGGATGACTGGCAGAA
CCCCTTCCGCGTTCGGGGGTGTGCTCCCTGTGGCGGTCGCTTAACTGATTTCCTTCGCGGCTGGCCATTGTGTTCTC
CTAGGCAGAGAAACAACAGACATGGAAACTCAGCCATTGCTGTCAACATCGCCACGAGTGCCATCACATCTCGTCCT
CAGCGACGAGGAAAAGGAGCAGAGCTTAAGCATTCCACCGCCCAGTCCTGCCACCACCTCTACCCTAGAAGATAAGG
AGGTCGACGCATCTCATGACATGCAGAATAAAAAAGCGAAAGAGTCTGAGCCAGACATCGAACAAGACCCGGGCTAT
GTGACACCGGTGGAACACGAGGAAGAGTTGAAACGCTTTCTAGAGAGAGAGGATGAAAACTGCCCAAAACAGCAAGC
GGATAACTATCACCAAGATGCTGGAAATAGGGATCAGAACACCGACTACCTCATAGGGCTTGACGGGGAAGACGCGC
TCCTTAAACATCTAGCAAGACAGTCACTCATAGTCAAGGATGCATTATTGGACAGAACTGAAGTGCCCATCAGTGTC
GAAGAGCTCAGCCGCGCCTACGAGCTTAACCTATTTTCACCTCGTACTCCCCCCAAACGTCAGCCAAACGGCACCTG
CGAGCCAAATCCTCGCTTAAACTTTTATCCAGCTTTTGCTGTGCCAGAAGTACTGGCTACCTATCACATCTTTTTTA
AAAATCAAAAAATTCCAGTCTCCTGCCGCGCTAATCGCACCCGCGCCGATGCCCTACTCAATCTGGGACCTGGTTCA
CGCTTACCTGATATAGCTTCCTTGGAAGAGGTTCCAAAGATCTTCGAGGGTCTGGGCAATAATGAGACTCGGGCCGC
AAATGCTCTGCAAAAGGGAGAAAATGGCATGGATGAGCATCACAGCGTTCTGGTGGAATTGGAAGGCGATAATGCCA
GACTCGCAGTACTCAAGCGAAGCGTCGAGGTCACACACTTTGCATACCCCGCTGTCAACCTGCCCCCTAAAGTCATG
ACGGCCGTCATGGACCAGTTACTCATTAAGCGCGCAAGTCCCCTTTCAGAAGACATGCATGACCCAGATGCCTGTGA
TGAGGGTAAACCAGTGGTCAGTGATGAGCAGCTAACCCGATGGCTGGGCACCGACTCTCCCCGGGATTTGGAAGAGC
GTCGCAAGCTTATGATGGCCGTGGTGCTGGTTACCGTAGAACTAGAGTGTCTTCGGCGTTTCTTTACCGATTCAGAA
ACCTTGCGCAAACTCGAAGAGAATCTGCACTACACTTTTAGACACGGCTTTGTGCGGCAGGCATGCAAGATATCTAA
CGTGGAACTCACCAACCTGGTTTCCTACATGGGTATTCTGCATGAGAATCGCCTAGGACAAAGCGTGCTGCACAGCA
CCCTTAAGGGGGAAGCCCGCCGTGATTACATCCGCGATTGTGTTTATCTCTACCTGTGCCACACGTGGCAAACCGGC
ATGGGTGTATGGCAGCAATGTTTAGAAGAACAGAACCTGAAAGAGCTAAACAAGCTCTTACAGAAATCTCTTAAGGT
TCTGTGGACAGGGTTCGACGAGCGCACCGTCGCTTCCGACCTGGCAGACCTCATCTTCCCAGAGCGTCTCAGGGTTA
CTTTGCGAAACGGACTGCCTGACTTTATGAGCCAGAGCATGCTTAACAATTTTCGCTCTTTCATCCTGGAACGCTCC
GGTATCCTGCCCGCCACCTGCTGCGCACTGCCCTCCGACTTTGTGCCTCTCACCTACCGCGAATGCCCCCCGCCGCT
ATGGAGTCACTGCTACCTGTTCCGTCTGGCCAACTACCTCTCCTACCACTCGGATGTGATCGAGGATGTGAGCGGAG
ACGGCTTGCTGGAGTGTCACTGCCGCTGCAATCTGTGCACGCCCCACCGGTCCCTAGCTTGCAACCCCCAGTTGATG
AGCGAAACCCAGATAATAGGCACCTTTGAATTGCAAGGCCCCAGCAGCCAAGGCGATGGGTCTTCTCCTGGGCAAAG
TTTAAAACTGACCCCGGGACTGTGGACCTCCGCCTACTTGCGCAAGTTTGCCCCGGAAGATTACCACCCCTATGAAA
TCAAGTTCTATGAGGACCAATCACAGCCTCCGAAAGCCGAACTTTCGGCCTGCGTCATCACCCAGGGGGCAATTCTG
GCCCAATTGCAAGCCATCCAAAAATCCCGCCAAGAATTTCTACTGAAAAAGGGTAAGGGGGTCTACCTTGACCCCCA
GACCGGCGAGGAACTCAACACAAGGTTCCCTCAGGATGTCCCAACGACGAGAAAGCAAGAAGTTGAAGGTGCAGCCG
CCGCCCCCAGAAGATATGGAGGAAGATTGGGACAGTCAGGCAGAGGAAGCGGAGGAGGAGGACAGTCTGGAGGACAG
TCTGGAGGAAGACAGTTTGGAGGAGGAAAACGAGGAGGCAGAGGAGGTGGAAGAAGTAACCGCCGACAAACAGTTAT
CCTCGGCTGCGGAGACAAGCAACAGCGCTACCATCTCCGCTCCGAGTCGAGGAACCCGGCGGCGTCCCAGCAGTAGA
TGGGACGAGACCGGACGCTTCCCGAACCCAACCAGCGCTTCCAAGACCGGTAAGAAGGATCGGCAGGGATACAAGTC
CTGGCGGGGGCATAAGAATGCCATCATCTCCTGCTTGCATGAGTGCGGGGGCAACATATCCTTCACGCGGCGCTACT
TGCTATTCCACCATGGGGTGAACTTTCCGCGCAATGTTTTGCATTACTACCGTCACCTCCACAGCCCCTACTATAGC
CAGCAAATCCCGGCAGTCTCGACAGATAAAGACAGCGGCGGCGACCTCCAACAGAAAACCAGCAGCGGCAGTTAGAA
AATACACAACAAGTGCAGCAACAGGAGGATTAAAGATTACAGCCAACGAGCCAGCGCAAACCCGAGAGTTAAGAAAT
CGGATCTTTCCAACCCTGTATGCCATCTTCCAGCAGAGTCGGGGCCAAGAGCAGGAACTGAAAATAAAAAACCGATC
TCTGCGTTCGCTCACCAGAAGTTGTTTGTATCACAAGAGCGAAGATCAACTTCAGCGCACTCTCGAGGACGCCGAGG
CTCTCTTCAACAAGTACTGCGCGCTGACTCTTAAAGAGTAGGCAGCGACCGCGCTTATTCAAAAAAGGCGGGAATTA
CATCATCCTCGACATGAGTAAAGAAATTCCCACGCCTTACATGTGGAGTTATCAGCCCCAAATGGGATTGGCGGCAG
GCGCCTCCCAGGACTACTCCACCCGCATGAATTGGCTCAGCGCCGGGCCTTCTATGATTTCTCGAGTTAATGATATA
CGCGCCTACCGAAACCAAATACTTTTGGAACAGTCAGCTCTTACCACCACGCCCCGCCAACACCTTAATCCCAGAAA
TTGGCCCGCCGCCCTAGTGTACCAGGAAAGTCCCGCTCCCACCACTGTATTACTTCCTCGAGACGCCCAGGCCGAAG
TCCAAATGACTAATGCAGGTGCGCAGTTAGCGGGCGGCTCCACCCTATGTCGTCACAGGCCTCGGCATAATATAAAA
CGCCTGATGATCAGAGGCCGAGGTATCCAGCTCAACGACGAGTCGGTGAGCTCTCCGCTTGGTCTACGACCAGACGG
AATCTTTCAGATTGCCGGCTGCGGGAGATCTTCCTTCACCCCTCGTCAGGCTGTTCTGACTTTGGAAAGTTCGTCTT
CGCAACCCCGCTCGGGCGGAATCGGGACCGTTCAATTTGTGGAGGAGTTTACTCCCTCTGTCTACTTCAACCCCTTC
TCCGGATCTCCTGGGCACTACCCGGACGAGTTCATACCGAACTTCGACGCGATTAGCGAGTCAGTGGACGGCTACGA
TTGATGTCTGGTGACGCGGCTGAGCTATCTCGGCTGCGACATCTAGACCACTGCCGCCGCTTTCGCTGCTTTGCCCG
GGAACTCATTGAGTTCATCTACTTCGAACTCCCCAAGGATCACCCTCAAGGTCCGGCCCACGGAGTGCGGATTACTA
TCGAAGGCAAAATACACTCTCGCCTGCAACGAATTTTCTCCCAGCGGCCCGTGCTGATCGAGCGAGACCAGGGAAAC
ACCACGGTTTCCATCTACTGCATTTGTAATCACCCCGGATTGCATGAAAGCCTTTGCTGTCTTATGTGTACTGAGTT
TAATAAAAACTGAATTAAGACTCTCCTACGGACTGCCGCTTCTTCAACCCGGATTTTACAACCAGAAGAACGAAACT
TTTCCTGTCGTCCAGGACTCTGTTAACTTCACCTTTCCTACTCACAAACTAGAAGCTCAACGACTACACCGCTTTTC
CAGAAGCATTTTCCCTACTAATACTACTTTCAAAACCGGAGGTGAGCTCCAAGGTCTTCCTACAGAAAACCCTTGGG
TGGAAGCGGGCCTTGTAGTGCTAGGAATTCTTGCGGGTGGGCTTGTGATTATTCTTTGCTACCTATACACACCTTGC
TTCACTTTCCTAGTGGTGTTGTGGTATTGGTTTAAAAAATGGGGCCCATACTAGTCTTGCTTGTTTTACTTTCGCTT
TTGGAACCGGGTTCTGCCAATTACGATCCATGTCTAGACTTCGACCCAGAAAACTGCACACTTACTTTTGCACCCGA
CACAAGCCGCATCTGTGGAGTTCTTATTAAGTGCGGATGGGAATGCAGGTCCGTTGAAATTACACACAATAACAAAA
CCTGGAACAATACCTTATCCACCACATGGGAGCCAGGAGTTCCCGAGTGGTACACTGTCTCTGTCCGAGGTCCTGAC
GGTTCCATCCGCATTAGTAACAACACTTTCATTTTTTCTGAAATGTGCGATCTGGCCATGTTCATGAGCAAACAGTA
TTCTCTATGGCCTCCTAGCAAGGACAACATCGTAACGTTCTCCATTGCTTATTGCTTGTGCGCTTGCCTTCTTACTG
CTTTACTGTGCGTATGCATACACCTGCTTGTAACCACTCGCATCAAAAACGCCAATAACAAAGAAAAAATGCCTTAA
CCTCTTTCTGTTTACAGACATGGCTTCTCTTACATCTCTCATATTTGTCAGCATTGTCACTGCCGCTCACGGACAAA
CAGTCGTCTCTATCCCTCTAGGACATAATTACACTCTCATAGGACCCCCAATCACTTCAGAGGTCATCTGGACCAAA
CTGGGAAGCGTTGATTACTTTGATATAATCTGCAACAAAACAAAACCAATAATAGTAACTTGCAACATACAAAATCT
TACATTGATTAATGTTAGCAAAGTTTACAGCGGTTACTATTATGGTTATGACAGATACAGTAGTCAATATAGAAATT
ACTTGGTTCGTGTTACCCAGTTAAAAACCACGAAAATGCCAAATATGGCAAAGATTCGATCCGATGACAATTCTCTA
GAAACTTTTACATCTCCCACCACACCCGACGAAAAAAACATCCCAGATTCAATGATTGCAATTGTTGCAGCGGTGGC
AGTGGTGATGGCACTAATAATAATATGCATGCTTTTATATGCTTGTCGCTACAAAAAGTTTCATCCTAAAAAACAAG
ATCTCCTACTAAGGCTTAACATTTAATTTCTTTTTATACAGCCATGGTTTCCACTACCACATTCCTTATGCTTACTA
GTCTTGCAACTCTGACTTCTGCTCGCTCACACCTCACTGTAACTATAGGCTCAAACTGCACACTAAAAGGACCTCAA
GGTGGTCATGTCTTTTGGTGGAGAATATATGACAATGGATGGTTTACAAAACCATGTGACCAACCTGGTAGATTTTT
CTGCAACGGCAGAGACCTAACCATTATCAACGTGACAGCAAATGACAAAGGCTTCTATTATGGAACCGACTATAAAA
GTAGTTTAGATTATAACATTATTGTACTGCCATCTACCACTCCAGCACCCCGCACAACTACTTTCTCTAGCAGCAGT
GTCGCTAACAATACAATTTCCAATCCAACCTTTGCCGCGCTTTTAAAACGCACTGTGAATAATTCTACAACTTCACA
TACAACAATTTCCACTTCAACAATCAGCATTATCGCTGCAGTGACAATTGGAATATCTATTCTTGTTTTTACCATAA
CCTACTACGCCTGCTGCTATAGAAAAGACAAACATAAAGGTGATCCATTACTTAGATTTGATATTTAATTTGTTCTT
TTTTTTTTTATTTACAGTATGGTGAACACCAATCATGGTACCTAGAAATTTCTTCTTCACCATACTCATTTGTGCAT
TTAATGTTTGCGCTACTTTCACAGCAGTAGCCACAGCAACCCCAGACTGTATAGGAGCATTTGCTTCCTATGCACTT
TTTGCTTTTGTTACTTGCATCTGCGTATGTAGCATAGTCTGCCTGGTTATTAATTTTTTCCAACTTCTAGACTGGAT
CCTTGTGCGAATTGCCTACCTGCGCCACCATCCCGAATACCGCAACCAAAATATCGCGGCACTTCTTAGACTCATCT
AAAACCATGCAGGCTATACTACCAATATTTTTGCTTCTATTGCTTCCCTACGCTGTCTCAACCCCAGCTGCCTATAG
TACTCCACCAGAACACCTTAGAAAATGCAAATTCCAACAACCGTGGTCATTTCTTGCTTGCTATCGAGAAAAATCAG
AAATTCCCCCAAATTTAATAATGATTGCTGGAATAATTAATATAATCTGTTGCACCATAATTTCATTTTTGATATAC
CCCCTATTTGATTTTGGCTGGAATGCTCCCAATGCACATGATCATCCACAAGACCCAGAGGAACACATTCCCCTACA
AAACATGCAACATCCAATAGCGCTAATAGATTACGAAAGTGAACCACAACCCCCACTACTCCCTGCTATTAGTTACT
TCAACCTAACCGGCGGAGATGACTGAAACACTCACCACCTCCAATTCCGCCGAGGATCTGCTCGATATGGACGGCCG
CGTCTCAGAACAGCGACTTGCCCAACTACGCATCCGCCAGCAGCAGGAACGCGCGGCCAAAGAGCTCAGAGATGTCA
TCCAAATTCACCAATGCAAAAAAGGCATATTCTGTTTGGTAAAACAAGCCAAGATATCCTACGAGATCACCGCTACT
GACCATCGCCTCTCTTACGAACTTGGCCCCCAACGACAAAAATTTACCTGCATGGTGGGAATCAACCCCATAGTTAT
CACCCAGCAAAGTGGAGATACTAAGGGTTGCATTCACTGCTCCTGCGATTCCATCGAGTGCACCTACACCCTGCTGA
AGACCCTATGCGGCCTAAGAGACCTGCTACCAATGAATTAAAAAATGATTAATAAAAAATCACTTACTTGAAATCAG
CAATAAGGTCTCTGTTGAAATTTTCTCCCAGCAGCACCTCACTTCCCTCTTCCCAACTCTGGTATTCTAAACCCCGT
TCAGCGGCATACTTTCTCCATACTTTAAAGGGGATGTCAAATTTTAGCTCCTCTCCTGTACCCACAATCTTCATGTC
TTTCTTCCCAGATGACCAAGAGAGTCCGGCTCAGTGACTCCTTCAACCCTGTCTACCCCTATGAAGATGAAAGCACC
TCCCAACACCCCTTTATAAACCCAGGGTTTATTTCCCCAAATGGCTTCACACAAAGCCCAGACGGAGTTCTTACTTT
AAAATGTTTAACCCCACTAACAACCACAGGCGGATCTCTACAGCTAAAAGTGGGAGGGGGACTTACAGTGGATGACA
CTGATGGTACCTTACAAGAAAACATACGTGCTACAGCACCCATTACTAAAAATAATCACTCTGTAGAACTATCCATT
GGAAATGGATTAGAAACTCAAAACAATAAACTATGTGCCAAATTGGGAAATGGGTTAAAATTTAACAACGGTGACAT
TTGTATAAAGGATAGTATTAACACCTTATGGACTGGAATAAACCCTCCACCTAACTGTCAAATTGTGGAAAACACTA
ATACAAATGATGGCAAACTTACTTTAGTATTAGTAAAAAACGGAGGGCTTGTTAATGGCTACGTGTCTCTAGTTGGT
GTATCAGACACTGTGAACCAAATGTTCACACAAAAGACAGCAAACATCCAATTAAGATTATATTTTGACTCTTCTGG
AAATCTATTAACTGATGAATCAGACTTAAAAATTCCACTTAAAAATAAATCTTCTACAGCGACCAGTGAAACTGTAG
CCAGCAGCAAAGCCTTTATGCCAAGTACTACAGCTTATCCCTTCAACACCACTACTAGGGATAGTGAAAACTACATT
CATGGAATATGTTACTACATGACTAGTTATGATAGAAGTCTATTTCCCTTGAACATTTCTATAATGCTAAACAGCCG
TATGATTTCTTCCAATGTTGCCTATGCCATACAATTTGAATGGAATCTAAATGCAAGTGAATCTCCAGAAAGCAACA
TAGCTACGCTGACCACATCCCCCTTTTTCTTTTCTTACATTACAGAAGACGACAACTAAAATAAAGTTTAAGTGTTT
TTATTTAAAATCACAAAATTCGAGTAGTTATTTTGCCTCCACCTTCCCATTTGACAGAATACACCAATCTCTCCCCA
CGCACAGCTTTAAACATTTGGATACCATTAGAGATAGACATTGTTTTAGATTCCACATTCCAAACAGTTTCAGAGCG
AGCCAATCTGGGGTCAGTGATAGATAAAAATCCATCGCGATAGTCTTTTAAAGCGCTTTCACAGTCCAACTGCTGCG
GATGCGAATCCGGAGTCTGGATCACGGTCATCTGGAAGAAGAACGATGGGAATCATAATCCGAAAACGGTATCGGAC
GATTGTGTCTCATCAAACCCACAAGCAGCCGCTGTCTGCGTCGCTCCGTGCAACTGCTGTTTATGGGATCAGGGTCC
ACAGTGTCCTGAAGCATGATTTTAATAGCCCTTAACATCAACTTTCTGGTGCGATGCGCGCAGCAACGCATTCTGAT
TTCACTCAAATCTTTGCAGTAGGTACAACACATTATTACAATATTGTTTAATAAACCATAATTAAAAGCGCTCCAGC
CAAAACTCATATCTGATATAATCGCCCCTGCATGACCATCATACCAAAGTTTAATATAAATTAAATGACGTTCCCTC
AAAAACACACTACCCACATACATGATCTCTTTTGGCATGTGCATATTAACAATCTGTCTGTACCATGGACAACGTTG
GTTAATCATGCAACCCAATATAACCTTCCGGAACCACACTGCCAACACCGCTCCCCCAGCCATGCATTGAAGTGAAC
CCTGCTGATTACAATGACAATGAAGAACCCAATTCTCTCGACCGTGAATCACTTGAGAATGAAAAATATCTATAGTG
GCACAACATAGACATAAATGCATGCATCTTCTCATAATTTTTAACTCCTCAGGATTTAGAAACATATCCCAGGGAAT
AGGAAGCTCTTGCAGAACAGTAAAGCTGGCAGAACAAGGAAGACCACGAACACAACTTACACTATGCATAGTCATAG
TATCACAATCTGGCAACAGCGGGTGGTCTTCAGTCATAGAAGCTCGGGTTTCATTTTCCTCACAACGTGGTAACTGG
GCTCTGGTGTAAGGGTGATGTCTGGCGCATGATGTCGAGCGTGCGCGCAACCTTGTCATAATGGAGTTGCTTCCTGA
CATTCTCGTATTTTGTATAGCAAAACGCGGCCCTGGCAGAACACACTCTTCTTCGCCTTCTATCCTGCCGCTTAGCG
TGTTCCGTGTGATAGTTCAAGTACAGCCACACTCTTAAGTTGGTCAAAAGAATGCTGGCTTCAGTTGTAATCAAAAC
TCCATCGCATCTAATTGTTCTGAGGAAATCATCCACGGTAGCATATGCAAATCCCAACCAAGCAATGCAACTGGATT
GCGTTTCAAGCAGGAGAGGAGAGGGAAGAGACGGAAGAACCATGTTAATTTTTATTCCAAACGATCTCGCAGTACTT
CAAATTGTAGATCGCGCAGATGGCATCTCTCGCCCCCACTGTGTTGGTGAAAAAGCACAGCTAAATCAAAAGAAATG
CGATTTTCAAGGTGCTCAACGGTGGCTTCCAACAAAGCCTCCACGCGCACATCCAAGAACAAAAGAATACCAAAAGA
AGGAGCATTTTCTAACTCCTCAATCATCATATTACATTCCTGCACCATTCCCAGATAATTTTCAGCTTTCCAGCCTT
GAATTATTCGTGTCAGTTCTTGTGGTAAATCCAATCCACACATTACAAACAGGTCCCGGAGGGCGCCCTCCACCACC
ATTCTTAAACACACCCTCATAATGACAAAATATCTTGCTCCTGTGTCACCTGTAGCGAATTGAGAATGGCAACATCA
ATTGACATGCCCTTGGCTCTAAGTTCTTCTTTAAGTTCTAGTTGTAAAAACTCTCTCATATTATCACCAAACTGCTT
AGCCAGAAGCCCCCCGGGAACAAGAGCAGGGGACGCTACAGTGCAGTACAAGCGCAGACCTCCCCAATTGGCTCCAG
CAAAAACAAGATTGGAATAAGCATATTGGGAACCGCCAGTAATATCATCGAAGTTGCTGGAAATATAATCAGGCAGA
GTTTCTTGTAAAAATTGAATAAAAGAAAAATTTGCCAAAAAAACATTCAAAACCTCTGGGATGCAAATGCAATAGGT
TACCGCGCTGCGCTCCAACATTGTTAGTTTTGAATTAGTCTGCAAAAATAAAAAAAAAAACAAGCGTCATATCATAG
TAGCCTGACGAACAGGTGGATAAATCAGTCTTTCCATCACAAGACAAGCCACAGGGTCTCCAGCTCGACCCTCGTAA
AACCTGTCATGGTGATTAAACAACAGCACCGAAAGTTCCTCGCGGTGACCAGCATGAATAATTCTTGATGAAGCATA
CAATCCAGACATGTTAGCATCAGTTAACGAGAAAAAACAGCCAACATAGCCTTTGGGTATAATTATGCTTAATCGTA
AGTATAGCAAAGCCACCCCTCGCGGATACAAAGTAAAAGGCACAGGAGAATAAAAAATATAATTATTTCTCTGCTGC
TGTTCAGGCAACGTCGCCCCCGGTCCCTCTAAATACACATACAAAGCCTCATCAGCCATGGCTTACCAGACAAAGTA
CAGCGGGCACGCACAAGCTCTAAAGTCACTCTCCAACCTCTCCACAATATATATACACAAGCCCTAAACTGACGTAA
TGGGAGTAAAGTGTAAAAAATCCCGCCAAACCCAACACACACCCCGAAACTGCGTCACCAGGGAAAAGTACAGTTTC
ACTTCCGCAATCCCAACAAGCGTCACTTCCTCTTTCTCACGGTACGTCACATCCCATTAACTTGCAACGTCATTTTC
CCACGGCCGCGCCGCCCCGTTTAGCCGTTAACCCCACAGCCAATCACCACACACCCCACAATTTTTAAAATCACCTC
ATTTACATATTGGCACCATTCCATCTATAAGGTATATTATTGATGATG

GenBank Accession No. AAW33501 (SEQ ID NO: 232)

MTKRVRLSDSFNPVYPYEDESTSQHPFINPGFISPNGFTQSPDGVLTLKCLTPLTTTGGSLQLKVGGGLTVDDTDGT
LQENIRATAPITKNNHSVELSIGNGLETQNNKLCAKLGNGLKFNNGDICIKDSINTLWTGINPPPNCQIVENTNIND
GKLTLVLVKNGGLVNGYVSLVGVSDTVNQMFTQKTANIQLRLYFDSSGNLLTDESDLKIPLKNKSSTATSETVASSK
AFMPSTTAYPFNTTTRDSENYIHGICYYMTSYDRSLFPLNISIMLNSRMISSNVAYAIQFEWNLNASESPESNIATL
TTSPFFFSYITEDDN

GenBank Accession No. ABC49791 (SEQ ID NO: 233)

MRRVVLGGAVVYPEGPPPSYESVMQQQQATAVMQSPLEAPFVPPRYLAPTEGRNSIRYSELAPQYDTTRLYLVDNKS
ADIASLNYQNDHSNFLTTVVQNNDFTPTEASTQTINFDERSRWGGQLKTIMHTNMPNVNEYMFSNKFKARVMVSRKP
PEGVRVDDNYDHKQDILKYEWFEFTLPEGNFSVTMTIDLMNNAIIDNYLKVGRQNGVLESDIGVKFDTRNFKLGWDP
ETKLIMPGVYTYEAFHPDIVLLPGCGVDFTESRLSNLLGIRKKHPFQEGFKILYEDLEGGNIPALLDVDAYENSKKD
QKAKIEAAAEAKANIVANDPVRVANASEIRGDSFAATSVPTKESLLDDVSQNIELKLTIKPVEKDGKNRSYNVLEDK
INTAYRSWYLSYNYGDPEKGVRSWTLLTTSDVTCGAEQVYWSLPDMMQDPVTFRSTRQVSNYPVVGAELMPVFSKSF
YNEQAVYSQQLRQSTSLTHVFNRFPFNQILIRPPAPTITTVSENVPALTDHGTLPLRSSIRGVQRVTVTDARRRTCP
YVYKALGIVAPRVLSSRTF

GenBank Accession No. AAW33485 (SEQ ID NO: 234)

MATPSMLPQWAYMHIAGQDASEYLSPGLVQFARATDTYFNLGNKFRNPTVAPTHDVTTDRSQRLMLRFVPVDREDNT
YSYKVRYTLAVGDNRVLDMASTFFDIRGVLDRGPSFKPYSGTAYNSLAPKGAPNASQWLDKGVTSTGLVDDGNTDDG
EEAKKATYTFGNAPVKAEAEITKDGLPVGLEVSTEGPKPIYADKLYQPEPQVGDETWTDLDGKTEEYGGRVLKPETK
MKPCYGSFAKPTNIKGGQAKVKPKEDDGINNIEYDIDMNFFDLRSQRSELKPKIVMYAENVDLECPDTHVVYKPGVS
DASSETNLGQQSMPNRPNYIGFRDNFIGLMYYNSTGNMGVLAGQASQLNAVVDLQDRNTELSYQLLLDSLGDRTRYF
SMWNQAVDSYDPDVRVIENHGVEDELPNYCFPLDGVGPRIDSYKEIKPNGDQSTWINVDPTGSSELAKGNPFAMEIN
LQANLWRSFLYSNVALYLPDSYKYTPSNVTLPENKNTYDYMNGRVVPPSLVDTYVNIGARWSLDAMDNVNPFNHHRN
AGLRYRSMLLGNGRYVPFHIQVPQKFFAVKNLLLLPGSYTYEWNFRKDVNMVLQSSLGNDLRVDGASISFTSINLYA
TFFPMAHNTASTLEAMLRNDTNDQSFNDYLSAANMLYPIPANATNIPISIPSRNWAAFRGWSFTRLKTKETPSLGSG
FDPYFVYSGSIPYLDGTFYLNHTFKKVSIMFDSSVSWPGNDRLLSPNEFEIKRTVDGEGYNVAQCNMTKDWFLVQML
ANYNIGYQGFYIPEGYKDRMYSFFRNFQPMSRQVVDEVNYKDFKAVAIPYQHNNSGFVGYMAPTMRQGQPYPANYPY
PLIGTTAVNSVTQKKFLCDRIMWRIPFSSNFMSMGALTDLGQNMLYANSAHALDMTFEVDPMDEPTLLYLLFEVFDV
VRVHQPHRGIIEAVYLRTPFSAGNATT

GenBank Accession No. DQ900900 (SEQ ID NO: 206)

CATCATCATAATATACCCCACAAAGTAAACAAAAGTTAATATGCAAATGAGCTTTTGAATTTTAACGGTTTTGGGGC
GGAGCCAACGCTGATTGGACGAGAAGCGGTGATGCAAATAACGTCACGACGCACGGCTAACGGCCGGCGCGGAGGCG
TGGCCTAGGCCGGAAGCAAGTCGCGGGGCTAATGACGTATAAAAAAGCGGACTTTAGACCCGGAAACGGCCGATTTT
CCCGCGGCCACGCCCGGATATGAGGTAATTCTGGGCGGATGCAAGTGAAATTAGGTCATTTTGGCGCCAAAACTGAA
TGAGGAAGTGAAAAGTGAAAAATACCTGTCCCGCCCAGGGCGGAATATTTACCGAGGGCCGAGAGACTTTGACCGAT
TACGTGGGGTTTCGATTGCGGTGTTTTTTTCGCGAATTTCCGCGTCCGTGTGAAAGTCCGGTGTTTATGTCACAGAT
CAGCTGATCCACAGGGTATTTAAACCAGTTGAGCCCGTCAAGAGGCCACTCTTGAGTGCCAGCGAGTAGAGATTTCT
CTGAGCTCCGCTCCCAAAGTGTGAGAAAAATGAGACACCTGCGCCTCCTGTCTTCAACTGTGCCTATTAACATGGCC
GCATTATTGCTGGAGGACTATGTGAGTACAGTATTGGAGGACGAACTACATCCATCTCCATTTGAGCTGGGACCTAC
ACTTCAGGACCTTTATGATTTGGAGGTAGATGCCCATGATGACGACCCAAACGAAGAGGCTGTGAATTTAATATTTC
CAGAATCTCTGATTCTTCAGGCTGACATAGCCAGCGAAGCTGTACCTACACCACTTCATACACCGACTTTGTCACCC
ATACCTGAATTGGAAGAGGAGGACGAGTTAGACCTCCGATGTTATGAGGAAGGTTTTCCTCCCAGCGATTCAGAGGA
CGAACAGGGTGAGCAGAGCATGGCTCTAATCTCAGAATATGCTTGTGTGGTTGTGGAAGAGCATTTTGTGTTGGACA
ATCCTGAGGTGCCCGGGCAAGGCTGTAGATCCTGCCAGTACCACCGGGATAAGACCGGAGACACAAACGCCTCCTGC
GCTCTGTGTTACATGAAAAAGAACTTCAGCTTTATTTACAGTAAGTGGAGTGAATGTGAGAGAGGCTGAGTGCTTAA
CACATAACTGGGTGATGCTTAAACAGCTGTGCTAAGTGTGGTTTATTTTTGTTTCTAGGTCCGGTGTCAGAGGATGA
GTCATCACCCTCAGAAGAAAACCACCCGTGTCCCCCTGAGCTGTCAGGCGAAACGCCCCTGCAAGTGCACAAACCCA
CCCCAGTCAGACCCAGTGGCGAGAGGCGAGCAGCTGTTGAAAAAATTGAGGACTTGTTACATGACATGGGTGGGGAT
GAACCTTTGGACCTGAGCTTGAAACGCCCCAGGAACTAGGCGCAGCTGTGCTTAGTCATGTGTAAATAAAGTTGTAC
AATAAAAGTATATGTGACGCATGCAAGGTGTGGTTTATGACTCATGGGCGGGGCTTAGTCCTATATAAGTGGCAACA
CCTGGGCACTGGGCACAGACCTTCAGGGAGTTCCTGATGGATGTGTGGACTATCCTTGCAGACTTTAGCAAGACACG
CCGGCTTGTAGAGGATAGTTCAGACGGGTGCTCCGGGTTCTGGAGACACTGGTTTGGAACTCCTCTATCTCGACTGG
TGTACACAGTTAAGAAGGATTATAACGAGGAATTTGAAAATCTTTTTGCTGATTGCTCTGGCCTGCTAGATTCTCTG
AATCTCGGCCACCAGTCCCTTTTCCAGGAAAGGGTACTCCACAGCCTTGATTTTTCCAGCCCAGGGCGCACTACAGC
CGGGGTTGCTTTTGTGGTTTTTCTGGTTGACAAATGGAGCCAGAACACCCAACTGAGCAGGGGCTACATTCTGGACT
TCGCAGCCATGCACCTGTGGAGGGCATGGGTGAGGCAGCGGGGACAGAGAATCTTGAACTACTGGCTTATACAGCCA
GCAGCTCCGGGTCTTCTTCGTCTACACAGACAAACATCCATGTTGGAGGAAGAAATGAGGCAGGCCATGGACGAGAA
CCCGAGGAGCGGCCTGGACCCTCCGTCGGAAGAGGAGCTGGATTGAATCAGGTATCCAGCTTGTACCCAGAGCTTAG
CAAGGTGCTGACATCCATGGCTAGGGGAGTGAAGAGGGAGAGGAGCGATGGGGGCAATACCGGGATGATGACCGAGC
TGACGGCCAGCCTGATGAATCGCAAGCGCCCAGAGCGCATTACCTGGCACGAGCTACAGATGGAGTGCAGGGATGAG
TTGGGCCTGATGCAGGATAAATATGGCCTGGAGCAGATAAAAACACATTGGTTGAACCCAGATGAGGATTGGGAGGA
GGCCATTAAGAAATATGCCAAGATAGCCCTGCGCCCAGATTGCAAGTACATAGTGACCAAGACCGTGAATATTAGAC
ATGCCTGCTACATTTCAGGGAACGGGGCAGAGGTGGTCATCGATACCCTGGACAAGGCCGCCTTCAGGTGTTGCATG
ATGGGAATGAGAGCAGGAGTGATGAATATGAATTCCATGATCTTCATGAACATGAAGTTCAATGGAGAGAAGTTTAA
TGGGGTGCTGTTCATGGCCAACAGCCACATGACCCTGCATGGCTGCAGTTTCTTTGGCTTCAACAATATGTGCGCCG
AGGTCTGGGGCGCTTCCAAGATCAGGGGATGTAAGTTTTATGGCTGCTGGATGGGCGTGGTCGGAAGACCTAAGAGC
GAGATGTCTGTGAAGCAGTGTGTGTTTGAGAAATGCTACCTGGGAGTCTCTACCGAGGGCAATGCTAGAGTGAGACA
CTGCTCTTCCCTGGATACGGGCTGCTTCTGCCTGGTGAAGGGTACGGCCTCTCTGAAGCATAATATGGTGAAGGGCT
GCACAGATGAGCGCATGTACAACATGCTAACATGCGACTCGGGGGTCTGTCATATCCTGAAGAACATCCATGTGACC
TCCCACCCCAGAAAGAAGTGGCCAGTGTTTGAGAATAACCTGCTGATCAAGTGCCATATGCACCTGGGTGCCAGAAG
GGGCACCTTCCAGCCGTACCAGTGCAACTTTAGCCAGACCAAGCTGCTGTTGGAAAACGATGCCTTCTCCAGGGTGA
ACCTGAACGGCATCTTTGACATGGATGTCTCGGTGTACAAGATCCTGAGATACGATGAGACCAAGTCCAGGGTGCGC
GCTTGCGAGTGCGGGGGCAGACACACCAGGATGCAGCCAGTGGCCCTGGATGTGACCGAGGAGCTGAGACCAGACCA
CCTGGTGATGGCCTGTACCGGGACCGAGTTCAGCTCCAGTGGGGAGGACACAGATTAGAGGTAGGTTTGAGTAGTGG
GCGTGGCTAATGTGAGTATAAAGGCGGGTGTCTTACGAGGGTCTTTTTGCTTTTCTGCAGACATCATGAACGGGACC
GGCGGGGCCTTCGAAGGGGGGCTTTTTAGCCCTTATTTGACAACCCGCCTGCCGGGATGGGCCGGAGTTCGTCAGAA
TGTGATGGGATCTACGGTGGATGGGCGTCCAGTGCTTCCAGCAAATTCCTCGACCATGACCTACGCGACCGTGGGGA
GCTCGTCGCTTGACAGCACCGCCGCAGCCGCGGCAGCCGCAGCCGCCATGACAGCGACGAGACTGGCCTCGAGCTAT
ATGCCCAGCAGCGGTAGCAGCCCCTCTGTGCCCAGTTCCATCATCGCCGAGGAGAAACTGCTGGCCCTGCTGGCCGA
GCTGGAAGCCCTGAGCCGCCAGCTGGCCGCCCTGACCCAGCAGGTGTCCGATCTCCGCGAGCAACAGCAGCAGCAAA
ATAAATGATTCAATAAACACAGATTCTGATTCAAACAGCAAAGCATCTTTATTATTTATTTTTTCGCGCGCGGTAGG
CCCTGGTCCACCTCTCCCGATCATTGAGAGTGCGGTGGATTTTTTCCAGGACCCGGTAGAGGTGGGATTGGATGTTG
AGGTACATGGGCATGAGCCCGTCCCGGGGGTGGAGGTAGCACCACTGCATGGCCTCGTGCTCTGGGGTCGTGTTGTA
GATAATCCAGTCATAGCAGGGGCGCTGGGCGTGGTGCTGGATGATGTCCTTGAGGAGGAGACTGATGGCCACGGGGA
GCCCCTTGGTGTAGGTGTTGGCAAAGCGGTTAAGCTGGGAGGGATGCATGCGGGGGGAGATGATGTGCAGTTTGGCC
TGGATCTTGAGGTTGGCGATGTTGCCACCCAGATCCCGCCGGGGGTTCATATTGTGCAGGACCACCAGAACGGTGTA
GCCCGTGCACTTGGGGAACTTATCATGCAACTTGGAAGGGAATGCGTGGAAGAATTTGGAGACGCCCTTGTGCCCGC
CCAGGTTTTCCATGCACTCATCCATGATGATGGCAATGGGCCCGTGGGCTGCGGCTTTGGCAAAAACGTTTCTGGGG
TCAGAGACATCATAATTATGCTCCTGGGTGAGATCATCATAAGACATTTTAATGAATTTGGGGCGAAGGGTGCCAGA
TTGGGGGACGATCGTTCCCTCGGGCCCCGGGGCGAAGTTCCCCTCGCAGATCTGCATCTCCCAGGCTTTCATCTCGG
AGGGGGGGATCATGTCCACCTGCGGGGCGATGAAAAAAACGGTTTCCGGGGCGGGGGTGATGAGCTGCGAGGAGAGC
AGGTTTCTTAACAGCTGGGACTTGCCGCACCCGGTCGGGCCGTAGATGACCCCGATGACGGGTTGCAGGTGGTAGTT
CAAGGAGATGCAGCTGCCGTCGTCCCGGAGGAGGGGGGCCACCTCGTTGAGCATGTCTCTCACTTGGAGGTTTTCCC
GGACGAGCTCGCCGAGGAGGCGGTCCCCGCCCAGCGAGAGCAGCTCTTGCAGGGAAGCAAAGTTTTTCAGGGGCTTG
AGCCCGTCGGCCATGGGCATCTTGGCAAGGGTCTGCGAGAGGAGCTCCAGGCGGTCCCATAGCTCGGTGACGTGCTC
TACGGCATCTCGATCCAGCAGACTTCCTCGTTTCGGGGGTTGGGACGACTGCGACTGTAGGGCACGAGACGATGGGC
GTCCAGCGCGGCCAGCGTCATGTCCTTCCAGGGTCTCAGGGTCCGAGTGAGGGTGGTCTCCGTCACGGTGAAGGGGT
GGGCCCCGGGCTGGGCGCTTGCAAGGGTGCGCTTGAGACTCATCCTGCTGGTGCTGAAACGGGCACGGTCTTCGCCC
TGCGCGTCGGCGAGATAGCAGTTGACCATGAGCTTGTAGTTAAGGGCCTCGGCGGCGTGGCCCTTGGCACGGAGCTT
GCCTTTGGAAGAGCGCCCGCAGGCGGGACAGAGGAGGGATTGCAGGGCGTAGAGCTTGGGTGCGAGAAAGACGGACT
CGGGAGCGAAGGCGTCCGCTCCGCAGTGGGCGCAGACGGTTTCGCACTCGACGAGCCAGGTGAGCTCGGGCTGCTCG
GGGTCAAAAACCAGTTTTCCCCCGTTCTTTTTGATGCGCTTCTTACCTCGCGTCTCCATGAGTCTGTGTCCGCGTTC
GGTGACAAACAGGCTGTCTGTGTCCCCGTAGACGGACTTGATTGGCCTGTCCTGCAGGGGCGTCCCGCGGTCCTCCT
CGTAGAGAAACTCGGACCACTCTGAGACAAAGGCGCGCGTCCACGCCAAGACAAAGGAGGCCACGTGCGAGGGGTAG
CGGTCGTTGTCCACCAGGGGGTCCACCTTTTCCACCGTGTGCAGACACATGTCCCCCTCCTCCGCATCCAAGAAGGT
GATTGGCTTGTAGGTGTAGGCCACGTGACCGGGGGTCCCCGACGGGGGGGTATAAAAGGGGGCGGGTCTGTGCTCGT
CCTCACTCTCTTCCGCGTCGCTGTCCACGAGCGCCAGCTGTTGGGGTAGGTATTCCCTCTCGAGAGCGGGCATGACC
TCGGCACTCAGGTTGTCAGTTTCTAGAAACGAGGAGGATTTGATGTTGGCCTGCCCTGCCGCAATGCTTTTTAGGAG
ACTTTCATCCATCTGGTCAGAAAAGACTATTTTTTTATTGTCAAGCTTGGTGGCAAAGGAGCCATAGAGGGCGTTGG
AGAGAAGCTTGGCGATGGATCTCATGGTCTGATTTTTGTCACGGTCGGCGCGCTCCTTGGCCGCGATGTTGAGCTGG
ACATACTCGCGCGCGACACACTTCCATTCTGGGAAGACGGTGGTGCGCTCGTCGGGCACGATCCTGACGCGCCAGCC
GCGATTATGCAGGGTGACCAGGTCCACGCTGGTGGCCACCTCGCCGCGCAGGGGCTCGTTGGTCCAGCAGAGGCGTC
CGCCCTTGCGCGAGCAGAACGGGGGCAGCACATCAAGCAGATGCTCGTCAGGGGGGTCCGCATCGATGGTGAAGATG
CCCGGACAGAGTTCCTTGTCAAAATAATCGATTTTTGAGGATGCATCATCCAAGGCCATCTGCCACTCGCGGGCGGC
CAGCGCTCGCTCGTAGGGGTTGAGGGGCGGACCCCAGGGCATGGGATGCGTGAGGGCGGAGGCGTACATGCCGCAGA
TGTCGTAGACATAGATGGGCTCCGAGAGGATGCCGATGTAGGTGGGATAACAGCGCCCCCCGCGGATGCTGGCGCGC
ACATAGTCATACAACTCGTGCGAGGGGGCCAAGAAAGCGGGGCCGAGATTGGTGCGCTGGGGCTGCTCGGCGCGGAA
GACGATCTGGCGAAAGATGGCATGCGAGTTGGAGGAGATGGTGGGCCGTTGGAAGATGTTAAAGTGGGCGTGGGGCA
AGCGGACCGAGTCGCGGATGAAGTGCGCGTAGGAGTCTTGCAGCTTGGCAACGAGCTCGGCGGTGACAAGGACGTCC
ATGGCGCAGTAGTCCAGCGTTTCACGGATGATGTCATAACCCGCCTCTTCTTTCTTCTCCCACAGCGCGCGGTTGAG
GGCGTACTCCTCGTCATCCTTCCAGTACTCCCGGAGCGGGAATCCTCGATCGTCCGCACGGTAAGAGCCCAGCATGT
AGAAATGGTTCACGGCCTTGTAGGGACAGCAGCCCTTCTCCACGGGGAGGGCGTAAGCTTGAGCGGCCTTGCGGAGC
GAGGTGTGCGTCAGGGCGAAGGTATCCCTAACCATGACTTTCAAGAACTGGTACTTGAAATCCGAGTCGTCGCAGCC
GCCGTGCTCCCAGAGCTCGAAATCGGTGCGCTTCTTCGAGAGGGGGTTAGGCAGAGCGAAAGTGACGTCATTGAAGA
GAATCTTGCCTGCCCGCGGCATGAAATTGCGGGTGATGCGGAAAGGGCCCGGAACGGAGGCTCGGTTGTTGATGACC
TGGGCGGCGAGGACGATCTCGTCGAAGCCGTTGATGTTGTGCCCGACGATGTAGAGTTCCATGAATCGCGGGCGGCC
TTTGATGTGCGGCAGCTTTTTGAGTTCCTCGTAGGTGAGGTCCTCGGGGCATTGCAGGCCGTGCTGCTCGAGCGCCC
ACTCCTGGAGATGTGGGTTGGCTTGCATGAATGAAGCCCAGAGCTCGCGGGCCATGAGGGTCTGGAGCTCGTCGCGA
AAGAGGCGGAACTGCTGGCCCACGGCCATCTTTTCTGGGGTGACGCAGTAGAAGGTGAGGGGGTCCCGCTCCCAGCG
ATCCCAGCGTAAGCGCACGGCGAGATCGCGAGCGAGGGCGACCAGCTCGGGGTCCCCGGAGAATTTCATGACCAGCA
TGAAGGGGACGAGCTGCTTGCCGAAGGACCCCATCCAGGTGTAGGTTTCTACATCGTAGGTGACAAAGAGCCGCTCC
GTGCGAGGATGAGAGCCGATTGGGAAGAACTGGATTTCCTGCCACCAGTTGGTCGAGTGGCTGTTGATGTGATGAAA
GTAGAAATCCCGCCGGCGAACCGAGCACTCGTGCTGATGCTTGTAAAAGCGTCCGCAGTACTCGCAGCGCTGCACGG
GCTGTACCTCATCCACGAGATACACAGCGCGTCCCTTGAGGAGGAACTTCAGGAGTGGCGGCCCTGGCTGGTGGTTT
TCATGTTCGCCTGCGTGGGACTCACCCTGGGGCTCCTCGAGGACGGAGAGGCTGACGAGCCCGCGCGGGAGCCAGGT
CCAGATCTCGGCGCGGCGGGGGCGGAGAGCGAAAACGAGGGCGCGCAGTTGGGAGCTGTCCATGGTGTCGCGGAGAT
CCAGGTCCGGGGGCAGGGTTCTGAGGTTGACCTCGTAGAGGCGGGTGAGGGCGTGCTTGAGATGCAGATGGTACTTG
ATCTCCACGGGTGAGTTGGTGGTCGTGTCCACGCATTGCATGAGCCCGTAGCTGCGCGGGGCCACGACCGTGCCGCG
GTGCGCTTTTAGAAGCGGTGTCGCGGACGCGCTCCCGGCGGCAGCGGCGGTTCCGGCCCCGCGGGCAGTGGCGGTAG
AGGCACGTCGGCGTGGCGCTCGGGCAGGTCCCGGTGCTGCGCCCTGAGAGCGCTGGCGTGCGCGACGACGCGGCGGT
TGACATCCTGGATCTGCCGCCTTTGCGTGAAGACCACGGGCCCCGTGACTTTGAACCTGAAAGACAGTTCAACAGAA
TCAATCTCGGCGTCATTGACGGCGGCCTGACGCAGGATCTCTTGCACGTCGCCCGAGTTGTCCTGGTAGGCGATCTC
GGACATGAACTGCTCGATTTCCTCCTCCTGGAGATCGCCGCGGCCCGCGCGCTCTACGGTGGCGGCAAGGTCATTCG
AGATGCGACCCATGAGCTGCGAGAAGGCGCCCAGGCCGCTCTCGTTCCAGACGCGGCTGTAAACCACGTCCCCGTCG
GCGTCGCGCGCGCGCATGACCACCTGCGCGAGGTTGAGCTCCACGTGCCGCGCGAAGACGGCATAGTTGCGCAGGCG
TTGGAAGAGGTAGTTGAGGGTGGTGGCGATGTGCTCGGTGACGAAGAAGTACATAATCCAGCGGCGCAGGGGCATTT
CGCTGATGTCGCCAATGGCCTCCAGCCTTTCCATGGCCTCGTAGAAATCCACGGCGAAGTTGAAAAACTGGGCGTTG
CGGGCCGAGACCGTGAGCTCGTCTTCCAGGAGCCTGATGAGTTCGGCGATGGTGGCGCGCACCTCGCGCTCGAAATC
CCCGGGGGCCTCCTCCTCTTCCTCTTCTTCCATGACGACCTCTTCTTCTATTTCTTCCTCTGGGGGCGGTGGTGGTG
GCGGGGCCCGACGACGACGGCGACGCACCGGGAGACGGTCGACGAAGCGCTCGATCATCTCCCCGCGGCGGCGACGC
ATGGTTTCGGTGACGGCGCGACCCCGTTCGCGAGGACGCAGCGTGAAGACGCCGCCGGTCATCTCCCGGTAATGGGG
TGGGTCCCCGTTGGGCAGCGATAGGGCGCTGACAATGCATCTTATCAATTGCGGTGTAGGGCACGTGAGCGCGTCGA
GATCGACCGGATCGGAGAATCTTTCGAGGAAAGCGTCTAGCCAATCGCAGTCGCAAGGTAAGCTCAAACACGTAGCA
GCCCTGTGGACGCTGTTAGAATTGCGGTTGCTGATGATGTAATTGAAGTAGGCGTTTTTGAGGCGGCGGATGGTGGC
GAGGAGGACCAGGTCCTTGGGTCCCGCTTGCTGGATGCGGAGCCGCTCGGCCATGCCCCAGGCCTGGCCCTGACACC
GGCTCAGGTTCTTGTAGTAGTCATGCATGAGCCTCTCGATGTCATCACTGGCGGAGGCGGAGTCTTCCATGCGGGTG
ACCCCGACGCCCCTGAACGGCTGCACGAGCGCCAGGTCGGCGACGACGCGCTCGGCGAGGATGGCCTGTTGCACGCG
GGTGAGGGTGTCCTGGAAGTCGTCCATGTCGACGAAGCGGTGGTAGGCCCCTGTGTTGATGGTGTAAGTGCAGTTGG
CCATAAGCGACCAGTTGACGGTCTGCAGGCCGGGTTGCACGACCTCGGAGTACCTGAGCCGCGAGAAGGCGCGCGAG
TCGAAGACATAGTCGTTGCAGGTGCGCACGAGGTACTGGTATCCGACTAGAAAGTGCGGCGGCGGCTGGCGGTAGAG
CGGCCAGCGCTGGGTGGCCGGCGCGCCCGGGGCCAGGTCCTCAAGCATGAGTCGGTGGTAGCCGTAGAGGTAGCGGG
ACATCCAGGTGATGCCGGCGGCGGTGGTGGAGGCGCGCGGGAACTCGCGGACGCGGTTCCAGATGTTGCGCAGGGGC
AGGAAATAGTCCATGGTCGGCACGGTCTGGCCGGTGAGACGCGCGCAGTCATTGATGCTCTAGAGGCAAAAACGAAA
GCGGTTGAGCGGGCTCTTCCTCCGTAGCCTGGCGGAACGCAAACGGGTTAGGCCGCGTGTGTACCCCGGTTCGAGTC
CCCTCGAATCAGGCTGGAGCCGCGACTAACGTGGTATTGGCACTCCCGTCTCGACCCAAGCCCGATAGCCGCCAGGA
TACGGCGGAGAGCCCTTTTTGTCGGCCGAGGGGAGTCGCTAGACTTGAAAGCGGCCGAAAACCCTGCCGGGTAGTGG
CTCGCGCCCGTAGTCTGGAGAAGCATCGCCAGGGTTGAGTCGCGGCAGAACCCGGTTCAAGGACGGCCGCGGCGAGC
GGGACTTGGTCACCCCGCCGATTTAAAGACCCACAGCCAGCCGACTTCTCCAGTTACGGGAGCGAGCCCCCTTTTTT
CTTTTTGCCAGATGCATCCCGTCCTGCGCCAAATGCGTCCCACCCCCCCGGCGACCACCGCGACCGCGGCCGTAGCA
GGCGCCGGCGCTAGCCAGCCACAGCCACAGACAGAGATGGACTTGGAAGAGGGCGAAGGGCTGGCGAGACTGGGGGC
GCCGTCCCCGGAGCGACATCCCCGCGTGCAGCTGCAGAAGGACGTGCGCCCGGCGTACGTGCCTGCGCAGAACCTGT
TCAGGGACCGCAGCGGGGAGGAGCCCGAGGAGATGCGCGACTGCCGGTTTCGGGCGGGCAGGGAGCTGCGCGAGGGC
CTGGACCGCCAGCGCGTGCTGCGCGACGAGGATTTCGAGCCGAACGAGCAGACGGGGATCAGCCCCGCGCGCGCGCA
CGTGGCGGCGGCCAACCTGGTGACGGCCTACGAGCAGACGGTGAAGCAGGAGCGCAACTTCCAAAAGAGTTTCAACA
ACCACGTGCGCACCCTGATCGCGCGCGAGGAGGTGGCCCTGGGCCTGATGCACCTGTGGGACCTGGCGGAGGCCATC
GTGCAGAACCCGGACAGCAAGCCTCTGACGGCACAGCTGTTCCTGGTGGTGCAGCACAGCAGGGACAACGAGGCGTT
CAGGGAGGCACTGCTGAACATCGCCGAGCCCGAGGGTCGCTGGCTGCTGGAGCTGATTAACATCTTGCAGAGCATCG
TAGTGCAGGAGCGCAGCCTGAGCCTGGCCGAGAAGGTGGCGGCGATCAACTACTCGGTGCTGAGCCTGGGCAAGTTT
TACGCGCGCAAGATTTACAAGACGCCGTATGTGCCCATAGACAAGGAGGTGAAGATAGACAGCTTTTACATGCGCAT
GGCGCTCAAGGTGCTGACGCTGAGCGACGACCTGGGCGTGTACCGCAACGACCGCATCCACAAGGCCGTGAGCACAA
GCCGGCGGCGCGAGCTGAGCGACCGCGAGCTGATGCTGAGTCTGCGCCGGGCGCTGGTAGGAGGCGCCACCGGCGGT
GAGGAGTCCTACTTTGACATGGGGGCGGACCTGCATTGGCAGCCGAGCCGACGCGCCTTGGAGGCCGCCTACGGTCC
AGAGGACTTGGATGAGGAAGAGGAAGAGGAGGAGGATGCACCCGTTGCGGGGTACTGACGCCTCCGTGATGTGTTTT
TAGATGCAGCAAGCCCCGGACCCCGCCATAAGGGCGGCGCTGCAAAGCCAGCCGTCCGGTCTAGCATCGGACGACTG
GGAGGCCGCGATGCAACGCATCATGGCCCTGACGACCCGCAACCCCGAGTCCTTTAGACAACAGCCGCAGGCCAACA
GACTCTCGGCCATTCTGGAGGCGGTGGTTCCTTCTCGGACCAACCCCACGCACGAGAAGGTGCTGGCGATCGTGAAC
GCGCTGGCGGAGAACAAGGCCATCCGTCCCGACGAGGCCGGGCTAGTGTACAACGCCCTGCTGGAGCGCGTGGGCCG
CTACAACAGCACAAACGTGCAGTCCAACCTGGACCGGCTGGTGACGGACGTGCGCGAGGCCGTGGCGCAGCGCGAGC
GGTTCAAGAACGAGGGCCTGGGTTCGCTGGTGGCGCTGAACGCCTTCCTGGCGACGCAGCCGGCGAACGTGCCGCGC
GGGCAGGATGATTATACCAACTTTATAAGCGCGCTGCGGCTGATGGTGACCGAGGTGCCCCAGAGCGAGGTGTACCA
GTCGGGCCCGGACTACTTTTTCCAGACGAGCAGACAGGGCCTGCAGACGGTGAACCTGAGTCAGGCTTTCAAGAACC
TGCGCGGGCTGTGGGGCGTGCAGGCGCCCGTGGGCGACCGGTCGACGGTGAGCAGCTTGCTGACGCCCAACTCGCGG
CTGCTGCTGCTGCTGATCGCGCCCTTCACCGACAGTGGCAGCGTGAACCGCAACTCGTACCTGGGTCACCTGCTGAC
GCTGTACCGCGAGGCCATAGGCCAGGCGCAGGTGGATGAGCAGACCTTCCAGGAGATCACTAGCGTGAGCCGCGCGC
TGGGTCAGAACGACACCGACAGTCTGAGGGCCACCCTGAACTTCTTGCTGACCAATAGACAGCAGAAGATCCCGGCG
CAGTACGCGCTGTCGGCCGAGGAGGAGCGCATCCTGAGATATGTGCAGCAGAGCGTAGGGCTGTTCCTGATGCAGGA
GGGGGCCACCCCCAGCGCCGCGCTGGACATGACCGCGCGCAACATGGAACCTAGCATGTACGCCGCCAACCGGCCGT
TTATTAATAAGCTGATGGACTACCTGCACCGCGCGGCGTCCATGAACTCGGACTACTTTACCAATGCCATCTTGAAC
CCGCACTGGCTCCCGCCGCCGGGGTTCTACACGGGCGAGTACGACATGCCTGACCCCAACGACGGGTTTTTGTGGGA
CGACGTGGACAGCGCGGTGTTCTCACCGACCTTGCAAAAGCGCCAGGAGGCGGTGCGCACGCCCGCGAGCGAGGGCG
CGGTGGGTCGGAGCCCCTTTCCTAGCTTAGGGAGTTTGCATAGCTTGCCGGGCTCGGTGAACAGCGGCAGGGTGAGC
CGGCCGCGCTTGCTGGGCGAGGACGAGTACCTGAACGACTCGCTGCTGCAGCCGCCGCGGGTCAAGAACGCCATGGT
CAATAACGGGATAGAGAGTCTGGTGGACAAACTGAACCGCTGGAAAACCTACGCTCAGGACCATAGGGAACCTGCGC
CCGCGCCGCGGCGACAGCGTCACGACCGGCAGCGGGGCCTGGTGTGGGACGACGAGGACTCGGCCGACGATAGCAGC
GTGTTGGACTTGGGCGGGAGCGGTGGGGCCAACCCGTTCGCGCATCTGCAGCCCAGACTGGGGCGACGGATGTTTTG
AATGCAAAATAAAACTCACCAAGGCCATAGCGTGCGTTCTCTTCCTTGTTAGAGATGAGGCGCGCGGTGGTGTCTTC
CTCTCCTCCTCCCTCGTACGAGAGCGTGATGGCGCAGGCGACCCTGGAGGTTCCGTTTGTGCCTCCGCGGTATATGG
CTCCTACGGAGGGCAGAAACAGCATTCGTTACTCGGAGCTGGCTCCGCTGTACGACACCACTCGCGTGTATTTGGTG
GACAACAAGTCGGCGGACATCGCTTCCCTGAACTACCAAAACGACCACAGCAACTTCCTGACCACGGTGGTGCAGAA
CAACGATTTCACCCCTGCCGAGGCCAGCACGCAGACGATAAATTTTGACGAGCGGTCGCGGTGGGGCGGTGATCTGA
AGACCATTCTGCACACCAACATGCCTAATGTGAACGAGTACATGTTCACCAGCAAGTTTAAGGCGCGGGTGATGGTG
GCTAGAAAAAAGGCGGAAGGGGCTGATGCAAATGATAGGAGCAAGGATATCTTAGAGTATCAGTGGTTTGAGTTTAC
CCTGCCCGAGGGCAACTTTTCCGAGACCATGACCATAGACCTAATGAACAACGCCATCTTGGAAAACTACTTGCAAG
TGGGGCGGCAAAATGGCGTGCTGGAGAGTGATATCGGAGTCAAGTTTGACAGCAGAAATTTCAAGCTGGGCTGGGAC
CCGGTGACCAAGCTGGTGATGCCAGGGGTCTACACCTACGAGGCCTTCCACCCGGACGTGGTGCTGCTGCCGGGCTG
CGGGGTGGATTTCACCGAGAGCCGCCTGAGCAACCTCCTGGGCATTCGCAAGAAGCAACCTTTTCAAGAGGGCTTCA
GAATCATGTATGAGGACCTAGTAGGGGGCAACATCCCCGCTCTCCTGAATGTCAAGGAGTATCTGAAGGATAAGGAA
GAAGCTGGCAAAGCAGATGCAAATACTATTAAGGCTCAGAATGATGCCGTCCCAAGAGGAGATAACTATGCATCAGC
GGCAGAAGCCAAAGCAGCAGGAAAAGAAATTGAGTTGAAGGCCATTTTGAAAGATGATTCAGACAGAAGCTACAATG
TGATCGAGGGAACCACAGACACCCTGTACCGCAGTTGGTACCTGTCCTATACCTACGGGGATCCCGAGAAGGGGGTG
CAGTCGTGGACGCTGCTCACCACCCCGGACGTCACCTGCGGCGCGGAGCAAGTCTACTGGTCGCTGCCGGACCTCAT
GCAAGACCCCGTCACCTTCCGCTCTACCCAGCAAGTCAGCAACTACCCCGTGGTCGGCGCCGAGCTCATGCCCTTCC
GCGCCAAGAGCTTTTACAACGACCTCGCCGTCTACTCCCAGCTCATCCGCAGCTACACCTCCCTCACCCACGTCTTC
AACCGCTTCCCCGACAACCAGATCCTTTGCCGCCCGCCCGCGCCCACCATCACCACCGTCAGTGAAAACGTGCCTGC
TCTCACAGATCACGGGACGCTACCGCTGCGCAGCAGTATCCGCGGAGTCCAGCGAGTGACCGTCACTGACGCCCGTC
GCCGCACCTGTCCCTACGTCTACAAGGCCCTGGGCATAGTCGCGCCGCGCGTGCTTTCCAGTCGCACCTTCTAAAAA
ATGTCTATTCTCATCTCGCCCAGCAATAACACCGGCTGGGGTCTTACTAGGCCCAGCACCATGTACGGAGGAGCCAA
GAAACGCTCCCAGCAGCACCCCGTCCGCGTCCGCGGTCACTTCCGCGCTCCCTGGGGCGCTTACAAGCGGGGGCGGA
CCTCTGCTCCTGCCGCCGTGCGCACCACCGTCGACGACGTCATCGACTCGGTGGTCGCCGATGCGCGCAACTACACC
CCCGCCCCCTCGACCGTGGACGCGGTCATCGACAGCGTGGTGGCAGACGCGCGTGACTATGCCAGACGCAAGAGCCG
GCGGCGACGGATCGCCAGGCGCCACCGGAGCACGCCCGCCATGCGCGCCGCCCGAGCTCTGCTGCGCCGCGCCAGAC
GCACGGGCCGCCGGGCCATGATGCGAGCCGCGCGCCGCGCTGCCACTGCACCCACCCCCGCAGGCAGGACTCGCAGA
CGAGCGGCCGCTGCCGCCGCCGCGGCCATCTCTAGCATGACCAGACCCAGGCGCGGAAACGTGTACTGGGTGCGCGA
CTCCGTCACGGGCGTGCGCGTGCCCGTGCGCACCCGTCCTCCTCGTCCCTGATCTAATGCTTGTGTCCTCCCCCGCA
AGCGACGATGTCAAAGCGCAAAATCAAGGAGGAGATGCTCCAGGTCGTCGCCCCGGAGATTTACGGACCACCCCAGG
CGGACCAGAAACCCCGCAAAATCAAGCGGGTTAAAAAAAAGGATGAGGTGGACGAGGGGGCAGTAGAGTTTGTGCGC
GAGTTCGCTCCGCGGCGGCGCGTAAATTGGAAGGGGCGCAGGGTGCAGCGTGTGTTGCGGCCCGGCACGGCGGTGGT
GTTCACGCCCGGCGAGCGGTCCTCGGTCAGGAGCAAGCGTAGCTATGACGAGGTGTACGGCGACGACGACATCCTGG
ACCAGGCGGCGGAGCGGGCGGGCGAGTTCGCCTACGGGAAGCGGTCGCGCGAAGAGGAGCTGATCTCGCTGCCGCTG
GACGAAAGCAACCCCACGCCGAGCCTAAAGCCCGTGACCCTGCAGCAGGTGCTGCCCCAGGCAGTGCTGCTGCCGAG
CCGCGGGGTCAAGCGCGAGGGCGAGAGCATGTACCCGACCATGCAGATCATGGTGCCCAAGCGCCGGCGCGTGGAGG
ACGTGCTGGACACCGTAAAAATGGATGTGGAGCCCGAGGTCAAGGTGCGCCCCATCAAGCAGGTGGCGCCGGGCCTG
GGCGTGCAAACCGTGGACATTCAGATCCCCACCGACATGGATGTCGACAAAAAACCCTCGACCAGCATCGAGGTGCA
AACCGACCCCTGGCTCCCAGCCTCCACCGCTACCGCGTCCACTTCTACCGCCGCCACGGCTACCGAGCCTCCCAGGA
GGCGAAGATGGGGCGCCGCCAGCCGGCTGATGCCCAACTACGTGTTGCATCCTTCCATCATCCCGACGCCAGGCTAC
CGCGGCACCCGGTACTACGCCAGCCGCAGGCGCCCAGCCAGCAAACGCCGCCGCCGCACCGCCACCCGCCGCCGTCT
GGCCCCCGCCCGCGTGCGCCGCGTGACCACGCGGCGGGGCCGCTCGCTCGTTCTGCCCACCGTGCGCTACCACCCCA
GCATCCTTTAATCCGTGTGCTGTGATACTGTTGCAGAGAGATGGCTCTCACTTGCCGCCTGCGCATCCCCGTCCCGA
ATTACCGAGGAAGATCCCGCCGCAGGAGAGGCATGGCAGGCAGTGGCCTGAACCGCCGCCGGCGGCGGGCCATGCGC
AGGCGCCTGAGTGGCGGCTTTCTGCCCGCGCTCATCCCCATAATCGCCGCGGCCATCGGCACGATCCCGGGCATAGC
TTCCGTTGCGCTGCAGGCGTCGCAGCGCCGTTGATGTGCGAATAAAGCCTCTTTAGACTCTGACACACCTGGTCCTG
TATATTTTTAGAATGGAAGACATCAATTTTGCGTCCCTGGCTCCGCGGCACGGCACGCGGCCGTTCATGGGCACCTG
GAACGAGATCGGCACCAGCCAGCTGAACGGGGGCGCCTTCAATTGGAGCAGTGTCTGGAGCGGGCTTAAAAATTTCG
GCTCGACGCTCCGGACCTATGGGAACAAGGCCTGGAATAGTAGCACTGGGCAGTTGTTAAGGGAAAAGCTCAAAGAC
CAGAACTTCCAGCAAAAGGTGGTGGACGGGCTGGCCTCGGGCATTAACGGGGTGGTGGACATCGCGAACCAGGCCGT
GCAGCGCGAGATAAACAGCCGCCTGGACCCGCGGCCGCCCACGGTGGTGGAGATGGAAGATGCAACTCTTCCGCCGC
CCAAGGGCGAGAAGCGACCGCGGCCCGACGCGGAGGAGACAATCCTGCAAGTGGACGAGCCGCCCTCGTACGAGGAG
GCCGTCAAGGCCGGCATGCCCACCACGCGCATCATCGCGCCGCTGGCCACGGGTGTAATGAAACCCGCTACCCTTGA
CCTGCCTCCACCACCCACGCCCGCTCCACCAAAAGCAGCTCCGGTTGTGCAGCCCCCTCCGGTGGCGACCGCCGTGC
GCCGCGTCCCCGCCCGCCGCCAGGCCCAGAACTGGCAGAGCACGCTGCACAGTATCGTGGGCCTGGGAGTGAAAAGT
CTGAAGCGCCGCCGATGCTATTGAGAGAGAGTAAAGAGGACACTAAAGGGAGAGCTTAACTTGTATGTGCCTTACCG
CCAGAGAACGCGCGAAGATGGCCACCCCCTCGATGATGCCGCAGTGGGCGTACATGCACATCGCCGGGCAGGACGCC
TCGGAGTACCTGAGCCCGGGTCTGGTGCAGTTTGCCCGCGCCACCGACACGTACTTCAGCCTGGGCAACAAGTTTAG
GAACCCCACGGTGGCTCCCACCCACGATGTGACCACGGACCGGTCCCAGCGTCTGACGCTGCGCTTTGTGCCCGTGG
ATCGCGAGGACACCACGTACTCGTACAAGGCGCGCTTCACTCTGGCCGTGGGCGACAACCGGGTGCTAGACATGGCC
AGCACTTACTTTGACATCCGCGGCGTCCTGGACCGCGGCCCAAGCTTCAAACCCTACTCGGGCACGGCTTACAACAG
CCTGGCCCCCAAGGGCGCCCCCAATCCCAGTCAGTGGACTACCAAAGAAAAGCAAAACGGAGGAACTGGAGCAGAAA
AAGATGTTACAAAGACATTTGGACTTGCCGCCATGGGAGGCAGTAATATTTCTAAAGACGGTTTGCAGATTGGAACT
GACAAAACAGCAAATGCTGAAAAACCAATCTATGCAGACAAAACTTTCCAGCCAGAACCTCAAGTTGGAGAAGAAAA
CTGGCAGGATAATGATGAATATTATGGCGGCAGGGCTCTTAAAAAAGATACCAAAATGAAGCCATGCTATGGTTCAT
TTGCTAAACCCACAAACAAGGAAGGTGGGCAGGCTAAATTGAAAGAAACACCCAATGGTACCGATCCTCAATACGAT
GTGGACATGGCTTTCTTTGACTCAAGCACTATAAATATACCAGATGTGGTGTTGTACACTGAAAATGTAGATTTGGA
AACTCCAGATACACATGTGGTGTACAAACCAGGCAAAGAGGATGACAGTTCTGAAGCTAATTTAACTCAGCAGTCCA
TGCCTAACAGACCAAACTACATTGGCTTCAGAGACAACTTTGTGGGGCTATTGTACTACAACAGCACTGGCAACATG
GGTGTGCTGGCTGGTCAGGCTTCTCAGTTGAATGCCGTGGTCGACTTGCAAGACAGAAACACCGAACTGTCTTACCA
GCTCTTGCTAGATTCTCTTGGTGACAGAACCAGATATTTTAGTATGTGGAACTCTGCGGTGGACAGCTATGATCCCG
ATGTCAGGATCATTGAGAACCACGGTGTGGAAGATGAACTTCCTAACTATTGCTTCCCCTTGGACGGTGTTCAAACT
AATTCAGCCTATCAAGGTGTTAAACTAAAGCCTGATCAAACAGGAGGCGGAGTTAATGGAGATTGGGTAAAGGATGA
TGACATTTCAGCCCATAATCAAATTGGAAAGGGCAACATCTTTGCCATGGAGATCAACCTCCAGGCCAACCTGTGGA
AGAGTTTTCTGTACTCGAACGTGGCCCTGTACCTGCCCGACTCCTACAAGTACACGCCGGCCAACGTCACGCTGCCC
GCCAACACCAACACCTATGAGTACATGAACGGCCGCGTGGTAGCCCCCTCGCTGGTGGACGCCTACATTAACATCGG
CGCCCGCTGGTCGCTGGACCCCATGGACAACGTCAACCCCTTTAACCACCACCGCAATGCGGGCCTGCGCTACCGCT
CCATGCTTTTGGGCAATGGCCGCTACGTGCCCTTCCACATCCAAGTGCCCCAAAAGTTCTTTGCCATCAAGAACCTG
CTCCTGCTCCCCGGCTCCTACACCTACGAGTGGAACTTCCGCAAGGATGTCAACATGATCCTGCAGAGTTCCCTCGG
AAACGACCTGCGCGTCGACGGCGCCTCCGTCCGCTTCGACAGCGTCAACCTCTACGCCACCTTCTTCCCCATGGCGC
ACAACACCGCCTCCACCCTGGAAGCCATGCTGCGCAACGACACCAACGACCAGTCCTTCAACGACTACCTCTCGGCC
GCCAACATGCTCTACCCCATCCCGGCCAAGGCCACCAACGTGCCCATTTCCATCCCCTCGCGCAACTGGGCCGCCTT
CCGCGGCTGGAGTTTCACCCGGCTCAAGACCAAGGAAACTCCCTCCCTTGGCTCGGGTTTTGACCCCTACTTTGTCT
ACTCGGGCTCCATCCCCTACCTCGACGGGACCTTCTACCTCAACCACACCTTCAAGAAGGTTTCCATCATGTTCGAC
TCCTCGGTCAGCTGGCCCGGCAACGACCGGCTGCTTACGCCGAACGAGTTCGAGATCAAGCGCAGCGTCGACGGGGA
GGGCTACAACGTGGCCCAATGCAACATGACCAAGGACTGGTTCCTCGTCCAGATGCTCTCCCACTACAACATCGGCT
ACCAGGGCTTCCATGTGCCCGAGGGCTACAAGGACCGCATGTACTCCTTCTTCCGCAACTTCCAGCCCATGAGCAGG
CAGGTGGTCGATGAGATCAACTACAAGGACTACAAGGCAGTCACCCTGCCCTTCCAGCACAACAACTCTGGCTTCAC
CGGCTACCTGGCACCCACCATGCGTCAGGGGCAGCCCTACCCCGCCAACTTCCCCTACCCGCTCATCGGCTCCACCG
CAGTGCCATCCGTCACCCAGAAAAAGTTCCTCTGCGACAGGGTCATGTGGCGCATCCCCTTCTCCAGCAACTTCATG
TCCATGGGCGCCCTCACCGACCTGGGTCAGAACATGCTCTACGCCAACTCGGCCCACGCGCTCGACATGACCTTCGA
GGTGGACCCCATGGATGAGCCCACCCTCCTCTATCTTCTCTTCGAAGTTTTCGACGTGGTCAGAGTGCACCAGCCGC
ACCGCGGCGTCATCGAGGCCGTCTACCTGCGCACGCCCTTCTCCGCCGGCAACGCCACCACCTAAGCATGAGCGGCT
CCAGCGAACGAGAGCTCGCGGCCATCGTGCGCGACCTGGGCTGCGGGCCCTACTTTTTGGGCACCCACGACAAGCGC
TTCCCGGGCTTCCTCGCCGGCGACAAGCTGGCCTGCGCCATCGTCAACACGGCCGGCCGCGAGACCGGGGGCGTGCA
CTGGCTCGCCTTTGGCTGGAACCCGCGCTCGCGCACCTGCTACATGTTCGACCCCTTCGGGTTCTCGGACCGCCGGC
TCAAGCAGATTTACAGCTTCGAGTACGAGGCCATGCTGCGCCGAAGCGCCCTGGCCTCCTCGCCCGATCGCTGTCTT
AGCCTCGAACAGTCCACCCAGACCGTGCAGGGGCCCGACTCCGCCGCCTGCGGACTCTTCTGTTGCATGTTCTTGCA
TGCCTTCGTGCACTGGCCCGACCGACCCATGGACGGGAACCCCACCATGAACTTGCTGACGGGGGTGCCCAACGGCA
TGCTACAATCGCCACAGGTGCTGCCCACCCTCAGGCGCAACCAGGAGGAGCTCTACCGCTTCCTCGCGCGCCACTCC
CCCTACTTTCGCTCCCACCGCGCCGCCATCGAACACGCCACCGCTTTTGATAAAATGAAACAACTGCGTGTATGACT
CAAATAAACAGCACTTTTATTTTACACATGCGCTGGAGTATATGCAAGTTATTTAAAAGTCGAAGGGGTTCTCGCGC
TCGTCGTTGTGCGCCGCGCTGGGGAGGGCCACGTTGCGGTACTGGAACTTGGGCTGCCACTTGAACTCGGGGATCAC
CAGTTTGGGCACTGGAGTCTCGGGGAAGGTCTCGCTCCACATGCGCCGGCTCATTTGCAGGGCGCCCAGCATGTCAG
GGCCGGAGATCTTGAAATCGCAGTTGGGACCGGTGCTCTGCGCGCGCGAGTTGCGGTACACGGGGTTGCAGCACTGG
AACACCATCAGACTGGGGTACTTCACACTGGCAAGCACGCTCTTGTCGCTAATCTGATCCTTGTCCAGGTCCTCGGC
GTTGCTCAGGCCGAACGGGGTCATCTTGCACAGCTGGCGGCCCAGGAAGGGCACGCTCTGAGGCTTGTGGTTACACT
CGCAGTGCACGGGCATCAGCATCATCCCCGCGCCGCGCTGCATATTCGGGTAGAGGGCCTTGACGAAGGCCGCGATC
TGCTTGAAAGCTTGCTGGGCCTTGGCCCCCTCGCTAAAAAACAGGCCGCAGCTCTTCCCGCTGAACTGGTTATTCCC
GCACCCGGCATCATGCACGCAGCAGCGCGCGTCATGGCTGGTCAGTTGCACCACGCTCCGTCCCCAGCGGTTCTGGG
TCACCTTAGCCTTGCTGGGCTGCTCCTTCAGCGCGCGCTGTCCGTTCTCGCTGGTCACATCCATCTCCACCACGTGG
TCCTTGTGAATCATCACCGTTCCATGCAGACACTTGAGCTGACCTTCCACCTCGGTGCAGCCGTGATCCCACAGGAC
GCAGCCGGTGCACTCCCAATTCTTGTGCGCGATCCCGCTGTGGCTGAAAATGTAACCTTGCAACAGGCGACCCATAA
TGGTGCTAAATGCTTTCTGGGTGGTGAATGTCAGTTGCATCCCGCGGGCCTCCTCGTTCATCCAGGTCTGGCACATC
TTCTGGAAGATCTCGGTCTGCTCCGGCATGAGCTTGTAAGCATCGCGCAAGCCGCTGTCGACGCGGTAGCGTTCCAT
CAGCACGTTCATGGTATCCATGCCCTTCTCCCATGACGAGACCAGAGGCAGACTCAGGGGGTTGCGCACGTTCAGGA
CACCAGGGGTCGCGGGCTCGACGATGCGTTTTCCGTCCTTGCCTTCCTTCAACAGAACCGGAGGCTGGCTGAATCCC
ACTCCCACGATCACGGCGTCTTCCTGGGGCATCTCTTCGTCGGGGTCTACCTTGGTCACATGCTTGGTCTTTCTGGC
TTGCTTCTTTTTTGGAGGGCTGTCCACGGGGACCACGTCCTCCTCGGAAGACCCGGAGCCCACCCGCTGATACTTTC
GGCGCTTGGTGGGCAGAGGAGGTGGCGGCGGCGAGGGGCTCCTCTCCTGCTCCGGCGGATAGCGCGCCGACCCGTGG
CCCCGGGGCGGAGTGGCCTCTCGCTCCATGAACCGGCGCACGTCCTGACTGCCGCCGGCCATTGTTTCCTAGGGGAA
GATGGAGGAGCAGCCGCGTAAGCAGGAGCAGGAGGAGGACTTAACCACCCACGAGCAACCCAAAATCGAGCAGGACC
TGGGCTTCGAAGAGCCGGCTCGTCTAAAACCCCCACAGGATGAACAGGAGCACGAGCAAGACGCAGGCCAGGAGGAG
ACCGACGCTGGGCTCGAGCATGGCTACCTGGGAGGAGAGGAGGATGTGCTGCTAAAACACCTGCAGCGCCAGTCCCT
CATCCTCCGGGACGCCCTGGCCGACCGGAGCGAAACCCCCCTCAGCGTCGAGGAGCTGTGTCGGGCCTACGAGCTCA
ACCTCTTCTCGCCGCGCGTGCCCCCCAAACGCCAGCCCAACGGCACCTGCGAGCCCAACCCGCGTCTCAACTTCTAT
CCCGTCTTTGCGGTCCCCGAGGCCCTTGCCACCTATCACATCTTTTTCAAGAACCAAAAGATCCCCATCTCCTGTCG
CGCCAATCGCACTCGCGCCGACGCGCTCCTCGCTCTGGGGCCCGGCGCGCGCATACCTGATATCGCTTCCCTGGAAG
AGGTGCCCAAGATCTTCGAAGGGCTCGGTCGGGACGAGACGCGCGCGGCAAACGCTCTGAAAGAAACAGCAGAGGAA
GAGGGTTACACTAGCGCCCTGGTAGAGTTGGAAGGCGACAACGCCAGGCTGGCCGTGCTTAAGCGCAGCGTCGAGCT
CACCCATTTCGCCTACCCCGCCGTCAACCTCCCGCCCAAGGTCATGCGTCGCATCATGGATCAGCTCATCATGCCCC
ACATCGAGGCCCTTGATGAAAGTCAGGAACAGCGCCCCGAGAACGCCCAGCCCGTGGTCAGCGACGAGATGCTCGCG
CGCTGGCTCGGGACCCGCGACCCCCAGGCCCTGGAGCAGCGGCGCAAGCTCATGCTGGCCGTGGTCCTGGTCACCCT
TGAGCTCGAATGCATGCGCCGCTTTTTTACCGACCCCGAGACCCTGCGCAAGGTCGAGGAGACCCTGCACTACACTT
TCAGACACGGTTTCGTCAGGCAGGCCTGCAAGATCTCCAACGTGGAGCTGACCAACCTGGTCTCCTGCCTGGGGATC
CTACACGAGAACCGCTTGGGACAGACCGTGCTCCACTCTACCCTGAAGGGCGAGGCGCGGCGGGACTACATCCGCGA
CTGCGTCTTTCTCTTTCTCTGCCACACATGGCAAGCGGCCATGGGCGTGTGGCAGCAGTGTCTCGAGGACGAGAACC
TGAAGGAGCTGGACAAGCTTCTTGCTAGAAACCTTAAAAAGCTGTGGACGGGCTTCGACGAGCGCACCGTCGCCTCG
GACCTGGCCGAGATCGTCTTCCCCGAGCGCCTGAGGCAGACGCTGAAAGGAGGGCTGCCCGACTTCATGAGCCAGAG
CATGTTGCAAAACTACCGCACTTTCATTCTCGAGCGATCTGGGATGCTGCCCGCCACCTGCAACGCCTTCCCCTCCG
ACTTTGTCCCGCTGAGCTACCGCGAGTGTCCCCCGCCGCTGTGGAGCCACTGCTACCTCTTGCAGCTGGCCAACTAC
ATTGCCCACCACTCGGATGTGATCGAGGACGTGAGCGGCGAGGGGCTGCTCGAGTGCCACTGTCGCTGCAACCTATG
CTCCCCGCACCGCTCCCTGGTCTGCAACCCCCAGCTACTGAGCGAGACCCAGGTCATCGGTACCTTTGAGCTGCAAG
GTCCGCAGGAGTCCACCGCTCCGCTGAAACTCACGCCGGGGTTGTGGACTTCCGCGTACCTGCGCAAATTTGTACCC
GAGGACTACTACGCCCATGAGATAAAGTTCTTCGAGGACCAATCGCGTCCGCAGCACGCGGATCTCACGGCCTGCGT
CATCACCCAGGGCGCGATCCTCGCCCAATTGCACGCCATCCAAAAATCCCGCCAAGAGTTTCTTCTGAAAAAGGGTA
GAGGGGTCTACCTGGACCCCCAGACGGGCGAGGTGCTCAACCCGGGTCTCCCCCAGCATGCCGAGGAAGAAGCAGGA
GCCGCTAGTGGAGGAGATGGAAGAAGAATGGGACAGCCAGGCAGAGGAGGACGAATGGGAGGAGGAGACAGAGGAGG
AAGACTTGGAAGAGGTGGAAGAGGAGCAGGCAACAGAGCAGCCCGTCGCCGCACCATCCGCGCCGGCAGCCCCTCCG
GTCACGGATACAACCTCCGCAGCTCCGGCCAAGCCTCCTCGTAGATGGGATCGAGTGAAGGGTGACGGTAAGCACGA
GCGACAGGGCTACCGATCATGGAGGGCCCACAAAGCCGCGATCATCGCCTGCTTGCAAGACTGCGGGGGGAACATCG
CTTTCGCCCGCCGCTACCTGCTCTTCCACCGCGGGGTGAACATCCCCCGCAACGTGTTGCATTACTACCGTCACCTT
CACAGCTAAGAAAAAGCAAGTCAAAGGAGTCGCCGGAGGAGGAGGCCTGAGGATCGCGGCGAACGAGCCCTTGACCA
CCAGGGAGCTGAGGAACCGGATCTTCCCCACTCTTTATGCCATTTTTCAGCAAAGTCGAGGTCAGCAGCAAGAGCTC
AAAGTAAAAAACCGGTCTCTGCGCTCGCTCACCCGCAGTTGCTTGTACCACAAAAACGAAGATCAGCTGCAGCGCAC
TCTCGAAGACGCCGAGGCTCTGTTCCACAAGTACTGCGCGCTGACTCTTAAAGACTAAGGCGCGCCCACCCGGAAAA
AAGGCGGGAATTACCTCATCGCCACCATGAGCAAGGAGATTCCCACCCCTTACATGTGGAGCTATCAGCCCCAGATG
GGCCTGGCCGCGGGCGCCTCCCAGGACTACTCCACCCGCATGAACTGGCTTAGTGCCGGCCCCTCGATGATCTCACG
GGTCAACGGGGTCCGTAACCATCGAAACCAGATATTGTTGCAGCAGGCGGCGGTCACCTCCACGCCCAGGGCAAAGC
TCAACCCGCGTAATTGGCCCTCCACCCTGGTGTATCAGGAAATCCCCGGGCCGACTACCGTACTACTTCCGCGTGAC
GCACTGGCCGAAGTCCGCATGACTAACTCAGGTGTCCAGCTGGCCGGCGGCGCTTCCCGGTGCCCGCTCCGCCCACA
ATCGGGTATAAAAACCCTGGTGATCCGAGGCAGAGGCACACAGCTCAACGACGAGTTGGTGAGCTCTTCAATCGGTC
TGCGACCGGACGGAGTGTTCCAACTAGCCGGAGCCGGGAGATCGTCCTTCACTCCCAACCAGGCCTACCTGACCTTG
CAGAGCAGCTCTTCGGAGCCTCGCTCGGGAGGCATCGGAACCCTCCAGTTCGTGGAGGAGTTTGTGCCCTCGGTCTA
CTTCAACCCCTTCTCGGGCTCGCCAGGCCTCTACCCGGACGAGTTTATACCGAACTTCGACGCAGTGAGAGAAGCGG
TGGACGGCTACGACTGAATGTCCTATGGTGACTCGGCTGAGCTCGCTCGGTTGAGGCATCTGGACCACTGCCGCCGC
CTGCGCTGCTTTGCCCGGGAGAGCTACGGCCTCATCTACTTTGAGCTGCCCGAGGAGCACCCCAACGGCCCTGCACA
CGGAGTGCGGATCACCGTAGAGGGCACCACCGAGTCTCACCTGGTCAGGTTCTTCACCCAGCAACCCTTCCTGGTCG
AGCGGGACCGGGGCGCCACCACCTACACCGTCTACTGCATTTGTCCTACCCCGAAGTTGCATGAGAATTTTTGTTGT
ACTCTTTGTGGTGAGTTTAATAAAAGCTAAACTCTTGCAATACTCTGGACCTTGTCGTCATCAACTCAACGAGACCG
TCTACCTCACCAACCAGACTGAGGTAAAACTTACCTGCAGACCACACAAGACCTATATCATCTGGTTCTTCGAGAAC
ACCTCATTTGCAGTCTCCAACACTCACTGCAACGACGGTGTTGAACTTCCCAACAACCTTTCCAGTGGACTGAGTTA
CAATACACGTAGAGCTAAGCTCATCCTCTACAATCCTTTTGTAGAGGGAACCTACCAGTGCCAGAGCGGACCTTGCT
TCCACAGTTTTACTTTGGTGAACGTTACCGGCAGCAGCACAGCCGCTCCAGAAACTAACCTTCCTTCTGATACTATC
AAACCTTGTTTCGGAGGTGAGCTAAGGCTTCCCCCTTCTCAGGAGGGGGTTAGCCCATACGAAGTGGTCGGGTATTT
GATTTTAGGGGTGGTCCTGGGTGGGTGCATAGCGGTGCTAGCTCAGCTGCCTTGCTGGGTGGAAATCAAAATCTTTA
TATGCTGGGTAAGACATTGTGGGGAGGAACTATGAAGGGGCTCTTGCTGATTATCCTTTCCCTGGTGGGGGGTGTGC
TGTCATGCCACGAACAGCCACGATGTAACATCACCACAGGCAATGAGAGGAACGACTGCTCTGTAGTTATCAAATGC
GAGCACCATTGTCCTCTCAACATTACATTCAAAAATAAGACCATGGGAAATGTATGGGTGGGATTCTGGCAACCAGG
AGATGAGCAGAACTACACGGTCACTGTCCATGGTAGCAATGGCAATCACACTTTCGGTTTCAAATTCATTTTTGAAG
TCATGTGTGATATCACACTACATGTGGCTAGACTTCATGGCTTGTGGCCCCCTACCAAGGATAACATGGTGGGTTTT
TCTTTGGCTTTTGTGATCATGGCCTGCTTGATGTCAGGTCTGCTGGTAGGGGCTCTAGTGTGGTTTCTGAAACGCAA
GCCCAGGTATGGAAATGAAGAGAAGGAAAAATTGCTATAAATTCTTTTTCTTTTTCGCAGAACCATGAATACAGTGA
TCCGTATCGTGCTGCTCTCTCTTCTTGTAGCTTTTAGTCAGGCAGGATTTCATACTATCAATGCTACATGGTGGGCT
AATATAACTTTAGTGGGACCCCCAGACACACCAGTCACTTGGTATGATACTCAAGGATTGTGGTTTTGCAATGGCAG
TAGAGTTAAGAATCCTCAAATCAGACATACATGTAATGATCAAAACCTTACTTTGATCCATGTGAACAAAACTTATG
AAAGAACATACATGGGTTATAATAGACAAGGGACTAAAAAAGAAGACTACAAAGTTGTAGTTATACCACCTCCTCCT
GCTACTGTAAAACCACAGCCAGAGCCAGAGTATGTGTTTGTTTATATGGGAGAGAACAAAACTCTAGAAGGTCCTCC
GGGAACTCCAGTCACATGGTTTAATCAGGATGGAAAGAAATTTTGTGAAGGAGAAAAAGTTCTTCATCCAGAATTTA
ACCACACCTGTGACAAACAAAACCTTATACTACTGTTTGTGAATTTTACACATGATGGAGCTTACCTTGGGTACAAT
CATCAAGGAACCCAGAGAACACACTATGAAGTTACAGTATTAGATCTTTTTCCAGATTCTGGCCAAATGAAAATTGA
AAATCATAGTGAGGAAACAGAGCAAAAAAATGATGAACATCATAACTGGCAGAAACAGGGTGGGCAAAAACAGGGTG
GGCAAAAAACAAATCAAACAAAAGTTAATGACAGGAGAAAAACAGCGCAAAAAAGACCATCAAAGCTAAAGCCGGCA
ACTATTGAGGCAATGCTGGTTACAGTGACTGCCGGGTCTAACTTAACTTTGGTTGGACCTAAAGCAGAAGGAAAAGT
TACTTGGTTTGATGGAGATTTAAAAAGACCATGTGAGCCTAATTACAGACTAAGACACGAATGTAATAATCAAAACT
TAACTCTGATTAATGTAACTAAAGATTATGAGGGAACTTACTATGGTACAAATGACAAAGATGAGGGCAAAAGGTAC
AGAGTGAAAGTAAATACTACAAATTCTCAATCTGTGAAAATTCAGCCATATACCAGACAAACTACTCCTGATCAAGA
GCACAAATTTGAATTACAGTTCGAAACTAATGGAAATTATGATTCAAAAATTCCCTCAACCACTGTGGCAATCGTGG
TGGGTGTGATTGCGGGCTTCATAACTCTGATCATTGTCTTCATATGCTACATCTGCTGCCGCAAGCGTCCCAGGGCA
TACAATCATATGGTAGACCCACTACTCAGCTTCTCTTACTAAGACTCAGTCACTTTCATTTCAGAACCATGAAGGCT
TTCACAGCTTGCGTTCTGATTAGCCTAGTCACACTTAGTGTAGCTATTAAAAATCAATATCATGTTCATAATGTTAC
CAGAGATGGATATATCACATTAAATGTAACAATTGATAATACTACCTGGACAAGATATCATTTAAATAAGTGGCATC
AAATTTGTACGTGGTCAGACCCATCATACAAATGTCACAGCAATGGCAGCATTACCATTCATGCTTTCAATATTACT
TCTGGCCAGTACAAAGCTGAAAGTTTTACTAACTGGTTTAGATATTACGGTAATCATAAACATGAAATTCATATTTT
TAACATAACTGTAATTGAGCATCCTACAACAAAAGCACCCACCACTGCTAATACAGCTACATCAATTAAATCAACAA
CCACACAGCCTACTACTAGGGAGACAACTCAACCTACCACCACAGTCAGTACAACTACTGAGACCACTACTCAAACT
ACACAGCTAGACACAACAGTGCAGAATAGCACTGTGTTGGTTAGGTATCTGTTGAGGGAGGAAAGTACTACTGAACA
GACAGAGGCTACCTCAAGTGCCTTTAGCAGCACTGCAAATTTAACTTCGCTTGCTTGGACTAATGAAACCGGAGTAT
CATTGATGAATCATCAGCCTTTCTCAGGTTTGGATATTCAAATTACTTTTCTGGTTGTTTGTGGGATCTTTATTCTT
GTGGTTCTTCTGTACTTTGTCTGCTGCAAAGCCAGAGAGAAATCTAGGAGGCCCATCTACAGGCCAGTAATCGGGGA
ACCTCAGCCACTCCAAGTGGAAGGGGGTCTAAGGAATCTTCTTTTCTCTTTTTCAGTATGGTGATCAGCCATGATTC
CTAGGTTCTTCCTATTTAACATCCTCTTCTGTCTCTTCAACATCTGCGCTGCCTTTGCAGCCGTCTCGCACGCCTCG
CCCGACTGTCTCGGGCCCTTCCCAACCTACCTCCTCTTTGCCCTGCTCACCTGCACCTGCGTCTGCAGCATTGTCTG
CCTGGTCATCACCTTCCTGCAGCTTATCGACTGGTGCTGTGCGCGCTACAATTATCTCCATCACAGTCCCGAATACA
GGGACAAGAACGTAGCCAGAATCTTAAGGCTCATCTGACCATGCAGACTCTGCTCATGCTGCTATCCCTCCTATCCC
CTGCCCTAGCCACTTATGCTGATTACTCTAAATGCAAATTCGCAGACATATGGAATTTCTTAGATTGCTATCAGGAA
AAAATTGATATGCCCTCCTATTACTTGGTGATTGTGGGAATAGTCATGGTCTGCTCCTGCACTTTCTTTGCCATCAT
GATTTACCCCTGTTTTGATCTCGGCTGGAACTCTGTTGAAGCATTCACATACACACTAGAAAGCAGTTCACTAGCCT
CCACGCCACCACCCACACCGCCTCCTCGCAGAAATCAGTTCCCCCTGATACAGTACTTAGAAGAGCCCCCTCCCCGA
CCCCCTTCCACTGTTAGCTACTTTCACATAACCGGCGGCGATGACTGACCACCACCTGGACCTCGAGATGGACGGCC
AGGCCTCCGAGCAGCGCATCCTGCAACTGCGCGTCCGTCAGCAGCAGGAGCGGGCCGCCAAGGAGCTCCTTGATGCC
ATCAACATCCACCAGTGCAAGAAGGGCATCTTCTGCCTGGTCAAACAGGCAAAGATCACCTACGAGCTCGTGTCCAA
CGGCAAACAGCATCGCCTTACCTATGAGATGCCCCAGCAGAAGCAGAAGTTCACCTGCATGGTGGGCGTCAACCCCA
TAGTCATCACCCAGCAGTCGGGCGAGACCAACGGCTGCATCCACTGCTCCTGCGAAAGCCCCGAGTGCATCTACTCC
CTTCTCAAGACCCTTTGCGGACTCCGCGACCTCCTCCCCATGAACTGATGTTGATTAAAAGCCCAGAAACCAATCAG
ACCCTTCCTCATTTCCCCATCCCAATACTCATAAGAATAAATCATTGGAATTAATCATTCAATAAAGATCACTTACT
TGAAATCTGAAAGTATGTCTCTGGTGTAGTTGCTCAGCAACACCTCGGTACCCTCCTCCCAGCTCTGGTACTCCAGT
CCCCGGCGGGCGGCGAACTTCCTCCACACCTTGAAAGGGATGTCAAATTCCTGGTCCACAATTTTCATTGTCTTCCC
TCTTAGATGTCAAAGAGGCTCCGGGTGGAAGATGACTTCAACCCCGTCTACCCCTATGGCTACGCGCGGAATCAGAA
TATCCCCTTCCTCACTCCCCCCTTTGTCTCCTCCGATGGATTCAAAAACTTCCCCCCTGGGGTACTGTCACTCAAAC
TGGCTGATCCAATCACCATTACCAATGGGGATGTATCCCTCAAGGTGGGAGGTGGTCTCACTTTGCAAGATGGAAGC
CTAACTGTAAACCCTAAGGCTCCACTGCAAGTTAATACTGATAAAAAACTTGAGCTTGCATATGATAATCCATTTGA
AAGTAGTGCTAATAAACTTAGTTTAAAAGTAGGACATGGATTAAAAGTATTAGATGAAAAAAGTGCTGCGGGGTTAA
AAGATTTAATTGGCAAACTTGTGGTTTTAACAGGAAAAGGAATAGGCACTGAAAATTTAGAAAATACAGATGGTAGC
AGCAGAGGAATTGGTATAAATGTAAGAGCAAGAGAAGGGTTGACATTTGACAATGATGGATACTTGGTAGCATGGAA
CCCAAAGTATGACACGCGCACACTTTGGACAACACCAGACACATCTCCAAACTGCACAATTGCTCAAGATAAGGACT
CTAAACTCACTTTGGTACTTACAAAGTGTGGAAGTCAAATATTAGCTAATGTGTCTTTGATTGTGGTCGCAGGAAAG
TACCACATCATAAATAATAAGACAAATCCAAAAATAAAAAGTTTTACTATTAAACTGCTATTTAATAAGAACGGAGT
GCTTTTAGACAACTCAAATCTTGGAAAAGCTTATTGGAACTTTAGAAGTGGAAATTCCAATGTTTCGACAGCTTATG
AAAAAGCAATTGGTTTTATGCCTAATTTGGTAGCGTATCCAAAACCCAGTAATTCTAAAAAATATGCAAGAGACATA
GTTTATGGAACTATATATCTTGGTGGAAAACCTGATCAGCCAGCAGTCATTAAAACTACCTTTAACCAAGAAACTGG
ATGTGAATACTCTATCACATTTAACTTTAGTTGGTCCAAAACCTATGAAAATGTTGAATTTGAAACCACCTCTTTTA
CCTTCTCCTATATTGCCCAAGAATGAAAGACCAATAAACGTGTTTTTCATTTGAAATTTTCATGTATCTTTATTGAT
TTTTACACCAGCACGAGTAGACAGTCTCCCACCACCAGCCCATTTTACAGTGTACACGGTTCTCTCAGCACGGGTAG
CCTTAAATAGGGAAATATTCTCATTAGTGCGGGAATTGGACTTGGGGTCTATAATCCACACAGTTTCCTGGCGAGCC
AAACGGGGGTCGGTGATTGAAATAAAGCCGTCCTCTGAAAAGTCATCCAAGCGGGCCTCACAGTCCAAGGTCACAGT
CTGGTGGAACGAGAAGAACGCACAGATTCATACTCGGAAAACAGGATGGGTCTGTGCCTCTCCATCAGCGCCCTCAG
CAGTCTCTGCCGCCGGGGCTCGGTGCGGCTGCTGCAAATGGGATCGGGATCACAAGTCTCTCTGACTATGATCCCAA
CAGCCTTCAGCATCAGTCTCCTGGTGCGACGGGCACAGCACCGCATCCTGATCTCTGCCATGTTCTCACAGTAAGTG
CAGCACATAATCACCATGTTATTCAGCAGCCCATAATTCAGGGCGCTCCAGCCAAAGCTCATGTTGGGAATGATGGA
ACCCACGTGACCATCGTACCAGATGCGACAGTATATCAGGTGCCTGCCCCTCATGAACACACTGCCCATGTACATGA
TCTCTTTGGGCATGTTTCTGTTTACAATCTGGCGGTACCAGGGGAAGCGCTGGTTGAACATGCACCCGTAAATGACT
CTCCTGAACCACACGGCCAGCAGGGTGCCTCCCGCCCGACACTGCAGGGAGCCAGGGGATGAACAGTGGCAATGCAG
GATCCAGCGCTCGTACCCGCTCACCATTTGAGCTCTTACCAAGTCCAGGGTAGCGGGGCACAGGCACACTGACATAC
ATCTTTTTAAAATTTTTATTTCCTCTGTGGTGAGGATCATATCCCAGGGGACTGGAAACTCTTGGAGCAGGGTAAAG
CCAGCAGCACATGGTAATCCACGGACAGAACTTACATTATGATAATCTGCATGATCACAATCGGGCAACAGGGGATG
TTGTTCAGTCAGTGAAGCCCTGGTTTCCTCATCAGATCGTGGTAAACGGGCCCTGCGATATGGATGATGGCGGAGCG
AGCTGGATTGAATCTCGGTTTGCATTGTAGTGGATTCTCTTGCGTACCTTGTCGTACTTCTGCCAGCAGAAATGGGC
CCTTGAACAGCATATACCCCTCCTACGGCCGTCCTTTCGCTGCTGCCGCTCAGTCATCCAACTAAAGTACATCCATT
CTCGAAGATTCTGGAGAAGTTCCTCTGCATCTGATAAAATAAAAAACCCGTCCATGCGAATTCCCCTCATCACATCA
GCCAGGACTCTGTAGGCCATCCCCATCCAGTTAATGCTGCCTTGTCTATCATTCAGAGGGGGCGGTGGCAGGACTGG
AAGAACCATTTTTATTCCAAACGGTCTCGAAGGACGATAAAGTGCAAGTCACGCAGGTGACAGCGTTCCCCTCCGCT
GTGCTGGTGGAAACAGACAGCCAGGTCAAAACCCACTCTATTTTCAAGGTGCTCGACCGTGGCTTCGAGCAGTGGCT
CTACGCGCACATCCAGCATAAGAATCACATTAAAGGCTGGCCCTCCATCGATTTCATCAATCATCAGGTTACATTCC
TGCACCATCCCCAGGTAATTCTCATTTTTCCAGCCTTGGATTATCTCTACAAATTGTTGGTGTAAGTCCACTCCGCA
CATGTGGAAAAGCTCCCACAGTGCCCCCTCCACTTTCATAATCAGGCAGACCTTCATAATAGAAACAGATCCTGCTG
CTCCACCACCTGCAGCGTGTTCAAAACAACAAGATTCAATAAGGTTCTGCCCTCCGCCCTGAGCTCGCGCCTCAATG
TCAGCTGCAAAAAGTCACTTAAGTCCTGGGCCACTACAGCTGACAATTCAGAGCCAGGGCTAAGCGTGGGACTGGCA
AGCGTAAGGGAAAACTTTAATGCTCCAAAGCTAGCACCCAAAAACTGCATGCTGGAATAAGCTCTCTTTGTGTCTCC
GGTGATGCCTTCCAAAATGTGAGTGATAAAGCGTGGTAGTTTTTCTTTAATCATTTGCGTAATAGAAAAGTCCTCTA
AATAAGTCACTAGGACCCCAGGGACCACAATGTGGTAGCTTACACCGCGTCGCTGAAGCATGGTTAGTAGAGATGAG
AGTCTGAAAAACAGAAAGCATGCACTAAACTAAGGTGGCTATTTTCACTGAAGGAAAAATCACTCTCTCCAGCAGCA
GGGTACCCACTGGGTGGCCCTTGCGGACATACAAAAATCGGTCCGTGTGATTAAAAAGCAGCACAGTAAGTTCCTGT
CTTCTTCCGGCAAAAATCACATCAGACTGGGTTAGTATGTCCCTGGCATGGTAGTCATTCAAGGCCATAAATCTGCC
CTGATATCCAGTAGGAACCAGCACACTCACTTTTAGGTGAAGCAATACCACCCCATGCGGAGGAATGTGGAAAGATT
CAGGGCAAAAAAATTATATCTATTGCTAGCCCCTTCCTGGACGGGAGCAATCCCTCCAGGACTATCTATAAAAGCAT
ACAGAGATTCAGCCATAGCTTAGCCCGCTTACCAGTAGACAGAAAGCACAGCAGTACAAGCGCCAACAGCAGCAACT
GACTACCCACTGACCCAGCTCCCTATTTAAAGGCACCTTACACTGACGTAATGACCAAAGGTCTAAAAACCCCGCCA
AAAAAAACACACACGCCCTGGGTGTTTTTCACAAAAACACTTCCGCGTTCTCACTTCCTCGTATCGATTTTGTGACT
CAACTTCCGGGTTCCCACGTTACGTCACTTCTGCCCTTACATGTAACTTGGCCGTATGGCGCCATCTTGCCCACGTC
CAAAATGGCTTTCATGACCGGCCACGCCTCCGCGCCGGCCGTTAGCCGTGCGTCGTGACGTTATTTGCATCACCGCT
TCTCGTCCAATCAGCGTTGGCTCCGCCCCAAAACCGTTAAAATTCAAAAGCTCATTTGCATATTAACTTTTGTTTAC
TTTGTGGGGTATATTATGATGATG

GenBank Accession No. ABK59080 (SEQ ID NO: 235)

MSKRLRVEDDFNPVYPYGYARNQNIPFLTPPFVSSDGFKNFPPGVLSLKL
ADPITITNGDVSLKVGGGLTLQDGSLTVNPKAPLQVNTDKKLELAYDNPF
ESSANKLSLKVGHGLKVLDEKSAAGLKDLIGKLVVLIGKGIGTENLENTD
GSSRGIGINVRAREGLIFDNDGYLVAWNPKYDTRTLWTTPDTSPNCTIAQ
DKDSKLTLVLTKCGSQILANVSLIVVAGKYHIINNKTNPKIKSFTIKLLF
NKNGVLLDNSNLGKAYWNFRSGNSNVSTAYEKAIGEMPNLVAYPKPSNSK
KYARDIVYGTIYLGGKPDQPAVIKTTFNQETGCEYSITENFSWSKTYENV
EFETTSFTFSYIAQE

GenBank Accession No. ABK59086 (SEQ ID NO: 236)

MRRAVVSSSPPPSYESVMAQATLEVPFVPPRYMAPTEGRNSIRYSELAPL
YDTTRVYLVDNKSADIASLNYQNDHSNFLTTVVQNNDFTPAEASTQTINF
DERSRWGGDLKTILHTNMPNVNEYMFTSKFKARVMVARKKAEGADANDRS
KDILEYQWFEFTLPEGNFSETMTIDLMNNAILENYLQVGRQNGVLESDIG
VKFDSRNFKLGWDPVTKLVMPGVYTYEAFHPDVVLLPGCGVDFTESRLSN
LLGIRKKQPFQEGFRIMYEDLVGGNIPALLNVKEYLKDKEEAGKADANTI
KAQNDAVPRGDNYASAAEAKAAGKEIELKAILKDDSDRSYNVIEGTTDTL
YRSWYLSYTYGDPEKGVQSWTLLTTPDVTCGAEQVYWSLPDLMQDPVTFR
STQQVSNYPVVGAELMPFRAKSFYNDLAVYSQLIRSYTSLTHVFNRFPDN
QILCRPPAPTITTVSENVPALTDHGTLPLRSSIRGVQRVTVTDARRRTCP
YVYKALGIVAPRVLSSRTF

GenBank Accession No. ABK59070 (SEQ ID NO: 237)

MCLTARERAKMATPSMMPQWAYMHIAGQDASEYLSPGLVQFARATDTYFS
LGNKERNPTVAPTHDVTTDRSQRLTLRFVPVDREDTTYSYKARFTLAVGD
NRVLDMASTYFDIRGVLDRGPSFKPYSGTAYNSLAPKGAPNPSQWTTKEK
QNGGTGAEKDVTKTFGLAAMGGSNISKDGLQIGTDKTANAEKPIYADKTF
QPEPQVGEENWQDNDEYYGGRALKKDTKMKPCYGSFAKPTNKEGGQAKLK
ETPNGTDPQYDVDMAFFDSSTINIPDVVLYTENVDLETPDTHVVYKPGKE
DDSSEANLTQQSMPNRPNYIGFRDNFVGLLYYNSTGNMGVLAGQASQLNA
VVDLQDRNTELSYQLLLDSLGDRTRYFSMWNSAVDSYDPDVRIIENHGVE
DELPNYCFPLDGVQTNSAYQGVKLKPDQTGGGVNGDWVKDDDISAHNQIG
KGNIFAMEINLQANLWKSFLYSNVALYLPDSYKYTPANVTLPANTNTYEY
MNGRVVAPSLVDAYINIGARWSLDPMDNVNPFNHHRNAGLRYRSMLLGNG
RYVPFHIQVPQKFFAIKNLLLLPGSYTYEWNFRKDVNMILQSSLGNDLRV
DGASVREDSVNLYATFFPMAHNTASTLEAMLRNDTNDQSENDYLSAANML
YPIPAKATNVPISIPSRNWAAFRGWSFTRLKTKETPSLGSGEDPYFVYSG
SIPYLDGTFYLNHTFKKVSIMFDSSVSWPGNDRLLTPNEFEIKRSVDGEG
YNVAQCNMTKDWFLVQMLSHYNIGYQGFHVPEGYKDRMYSFFRNFQPMSR
QVVDEINYKDYKAVTLPFQHNNSGFTGYLAPTMRQGQPYPANFPYPLIGS
TAVPSVTQKKFLCDRVMWRIPFSSNFMSMGALTDLGQNMLYANSAHALDM
TFEVDPMDEPTLLYLLFEVEDVVRVHQPHRGVIEAVYLRTPFSAGNATT

GenBank Accession No. AY737798 SEQ ID NO: 207)

CAATCAATATAATATACCTTATAGATGGAATGGTGCCAATATGTAAATGAGGTAATTTAAAAAAGTGCGCGCTGTGT
GGTGATTGGCTGCGGGGTGAACGGCTAAAAGGGGCGGACATGCTGGGAGGTGACGTGACTTATGGGGGAGGAGTTAT
GTTGCAAGTTATCGCGGTAAAGGTGACGTAAAACGAGGTGTGGTTTGGACACGGAAGTAGACAGTTTTCCCACGCTT
ACTGACAGGATATGAGGTAGTTTTGGGCGGATGCAAGTGAAAATTCTCCATTTTCGCGCGAAAACTGAATGAGGAAG
TGAATTTCTGAGTCATTTCGCGGTTATGACAGGGTGGAGTATTTGCCGAGGGCCGAGTAGACTTTGACCGTTTACGT
GGAGGTTTCGATTACCGTGTTTTTCACCTAAATTTCCGCGTACGGTGTCAAAGTCCTGTGTTTTTACGTAGGTGTCA
GCTGATCGCTAGGGTATTTAAACCTGTCGAGTTCCGTCAAGAGGCCACTCTTGAGTGCCAGCGAGAAGAGTTTTCTC
CTCCGCGCCGCGAGTCAGTTTTGCGCTTTGAAAATGAGACACCTGCGATTCCTGCCACAGGAGATTATCTCCAGCGA
GACCGGGATAGAAATACTGGAGTTTGTGGTAAATACCCTGATGGGAGATGACCCGGAACCGCCAGCGCAGCCTTTCG
ATCCACCTACGCTGCACGATCTGTATGATTTAGAGGTAGACGGGCCGGACGATCCCAATGAGGAAGCTGTAAATGGG
TTTTTTACTGATTCTATGCTACTAGCTGCCGATGAAGGATTGGACATAAACCCTCCTCCTGAGACCCTTGATACCCC
AGGGGTGGTTGTGGAAAGCGGCAGAGGTGGGATAAAATTGCCTGATCTGGGAGCAGCTGAAATGGACTTGCGTTGTT
ATGAAGAGGGTTTTCCTCCGAGTGATGATGAAGATGGGGAAACTGAACAGTCCATCCATACCGCAGTGAATGAGGGA
GTAAAAGCTGCCAGCGATGTTTTTAAGTTGGACTGTCCGGAGCTGCCTGGACATGGCTGTAAGTCTTGTGAATTTCA
CAGGAATAACACTGGAATGAAAGAACTATTGTGCTCGCTTTGCTATATGAGAATGCACTGCCATTTTATTTACAGTA
AGTGTATTTAAGTGAAATTTAAAGGAATAGTGTAGCTGTTTAATAACTGTTGAATGGTAGATTTATGTTTTTACTTG
TGATTTTTTGTAGGTCCTGTGTCTGATGATGAGTCGCCTTCTCCTGATTCAACTACCTCACCTCCTGAAATTCAGGC
GCCCGTACCTGCAAACGTATGCAAGCCCATTCCTGTGAAGCCTAAGTCTGGGAAACGCCCTGCTGTGGATAAGCTTG
AGGACTTGTTGGAGGGTGGGGATGGACCTTTGGACCTTAGTACCCGGAAACTGCCAAGGCAATGAGTGCCCTGCAGC
TGTGTTTATTTAATGTGACGTCATGTAATAAAATTATGTCAGCTGCTGAGTGTTTTATTGCTTCTTGGGTGGGGACT
TGGATATATAAGTAGGAGCAGATCTGTGTGGTTAGCTTATAGCAACCTGCTGCCATCCATGGAGGTTTGGGCTATCT
TGGAAGACCTGAGACAGACTAGGCTACTGCTAGAAAACGCCTCGGACGGAGTCTCTGGCTTTTGGAGATTCTGGTTC
GGTGGTGATCTAGCTAGGCTAGTGTTTAGGATAAAACAGGACTACAGGGAAGAATTTGAAAAGTTATTGGACGACAG
TCCAGGACTTTTTGAAGCTCTTAACTTGGGCCATCAGGCTCATTTTAAGGAGAAGGTTTTATCAGTTTTAGATTTTT
CTACTCCTGGTAGAACTGCTGCTGCTGTAGCTTTTCTTACTTTTATATTGGATAAATGGATCCGACAAACCCACTTC
AGCAAGGGATACGTTTTGGATTTCATAGCAGCAGCTTTGTGGAGAACATGGAAGGCTCGCAGCATGAGGACAATCTT
AGATTACTGGCCAGTGCAGCCTCTGGGAGTAGCAGGGATACTGAGACACCCACCGACCATGCCAGCGGTTCTGGAGG
AGGAGCAGCAGGAGGACAATCCGAGAGCCGGCCTGGACCCTCCGGTGGAGGAGTAGCTGACCTGTTTCCTGAACTGC
GACGGGTGCTTACTAGGTCTACGTCCAGTGGACAGGACAGGGGCATTAAGAGGGAAAGGAATCCTAGTGGGAATAAT
TCAAGAACCGAGTTGGCTTTAAGTTTAATGAGCCGTAGGCGTCCTGAAACTGTTTGGTGGCATGAGGTTCAGAGCGA
AGGCAGGGATGAAGTTTCAATATTGCAGGAGAAATATTCACTAGAACAACTTAAGACCTGTTGGTTGGAACCTGAGG
ATGATTGGGAGGTGGCCATTAGGAATTATGCTAAGATATCTCTGAGGCCTGATAAACAGTATAGAATTACTAAAAAG
ATTAATATTAGAAATGCATGCTACATATCAGGGAATGGGGCAGAGGTTATAATAGATACCCAAGATAAAGCAGCTTT
TAGATGTTGTATGATGGGTATGTGGCCAGGGGTTGTCGGCATGGAAGCAGTAACATTTATGAATATTAGGTTTAAAG
GGGATGGGTATAATGGCATTGTATTTATGGCTAACACTAAGCTGATTCTACATGGTTGTAGCTTTTTTGGGTTTAAT
AATACTTGTGTAGAAGCTTGGGGGCAAGTTGGTGTGAGGGGTTGTAGTTTTTATGCATGCTGGATTGCAACATCAGG
TAGGGTCAAGAGTCAGTIGTCTGTGAAGAAATGCATGTTTGAGAGATGTAATCTTGGCATACTGAATGAAGGTGAAG
CAAGGGTCCGCCACTGCGCAGCTACAGAAACTGGCTGCTTCATTCTAATAAAGGGAAATGCCAGTGTGAAGCATAAT
ATGATCTGTGGACATTCGAATGAGAGGCCTTATCAGATGCTGACTTGCGCTGGTGGACATTGCAATATTCTTGCTAC
CGTGCATATCGTTTCCCATGCACGCAAGAAATGGCCTGTATTTGAACATAATGTGATTACCAAGTGCACCATGCACA
TAGGTGGTCGCAGGGGAATGTTTATGCCTTACCAGTGTAACATGAATCATGTGAAGGTGATGTTGGAACCAGATGCC
TTTTCCAGAGTGAGCTTAACAGGAATCTTTGATATGAATATTCAACTATGGAAGATACTGAGATATGATGACACTAA
ACCGAGGGTGCGCGCATGCGAATGCGGAGGCAAGCATGCTAGATTCCAGCCGGTGTGCGTGGATGTGACTGAAGACC
TGAGACCCGATCATTTGGTGCTTGCCTGCACTGGAGCGGAGTTCGGTTCTAGTGGTGAAGAAACTGACTAAAGTGAG
TAGTGGGGCAAGATGTGGATGGAGACTTTCAGGTTGGTAAGGTGGACAGATTGGGTAAATTTTGTTAATTTCTGTCT
TGCAGCTGCCATGAGTGGAAGCGCTTCTTTTGAGGGGGGAGTATTTAGCCCTTATCTGACGGGCAGGCTCCCATCAT
GGGCAGGAGTTCGTCAGAATGTCATGGGATCCACTGTGGATGGGAGACCCGTCCAGCCCGCCAATTCCTCAACGCTG
ACCTATGCCACTTTGAGTTCGTCACCATTGGATGCAGCTGCAGCCGCCGCCGCTACTGCTGCCGCCAACACCATCCT
TGGAATGGGCTATTACGGAAGCATCGTTGCCAATTCCAGTTCCTCTAATAACCCTTCAACCCTGGCTGAGGACAAGC
TACTTGTTCTCTTGGCTCAGCTCGAGGCCTTAACCCAACGCTTAGGCGAACTGTCTAAGCAGGTGGCCCAGTTGCGT
GAGCAAACTGAGTCTGCTGTTGCCACAGCAAAGTCTAAATAAAGATCTCAAATCAATAAATAAAGAAATACTTGTTA
TAAAAACAAATGAATGTTTATTTGGTTTTTCGCGCGCGGTATGCCCTGGACCATCGGTCTCGATCATTGAGAACTCG
GTGGATCTTTTCCAGTACCCTGTAAAGGTGGGATTGAATGTTTAGATACATGGGCATTAGTCCGTCTCGGGGGTGGA
GATAGCTCCATTGAAGAGCCTCTTGCTCCGGGGTAGTGTTATAAATCACCCAGTCATAGCAAGGTCGGAGTGCATGG
TGTTGCACAATATCTTTTAGGAGCAGACTAATTGCAACGGGGAGGCCCTTAGTGTAGGTGTTTACAAATCTGTTGAG
CTGGGACGGGTGCATCCTGGGGGAAATTATATGCATTTTGGACTGGATCTTGAGGTTGGCAATGTTGCCGCCTAGAT
CCCGTCTCGGGTTCATATTGTGCAGAACCACCAAGACAGTGTATCCGGTGCACTTGGGAAATTTATCATGCAGCTTA
GAGGGAAAAGCATGAAAAAATTTGGAGACGCCTTTGTGACCCCCCAGATTCTCCATGCACTCATCCATAATGATAGC
GATGGGGCCGTGGGCAGCGGCACGGGCGAACACGTTCCGGGGGTCTGAAACATCATAGTTATGCTCCTGAGTCAGGT
CATCATAAGCCATTTTAATAAACTTTGGGCGGAGGGTGCCAGATTGGGGGATGAAAGTTCCCTCTGGCCCGGGAGCA
TAGTTTCCCTCACATATTTGCATTTCCCAGGCTTTCAGTTCCGAGGGGGGGATCATGTCCACCTGCGGGGCTATAAA
AAATACCGTTTCTGGAGCCGGGGTGATTAACTGGGATGAGAGCAAATTCCTAAGCAGCTGAGACTTGCCGCACCCAG
TGGGACCGTAAATGACCCCAATTACGGGTTGCAGATGGTAGTTTAGGGAGCGACAGCTGCCGTCCTCCCGGAGCAGG
GGGGCCACTTCGTTCATCATTTCCCTTACATGGATATTTTCCCGCACCAAGTCCGTTAGGAGGCGCTCTCCCCCAAG
GGATAGAAGCTCCTGGAGCGAGGAGAAGTTTTTCAACGGTTTCAGCCCGTCAGCCATGGGCATTTTGGAAAGAGTCT
GTTGCAAGAGCTCGAGCCGGTCCCAGAGCTCGGTGATGTGCTCTATGGCATCTCGATCCAGCAGACCTCCTCGTTTC
GCGGGTTGGGACGGCTCCTGGAGTAGGGAATCAGACGATGAGCGTCCAGCGCTGCTAGGGTCCGATCCTTCCATGGT
CGCAGCGTCCGAGTCAGGGTTGTTTCCGTCACGGTGAAGGGGTGCGCGCCTGGTTGGGCGCTTGCGAGGGTGCGCTT
CAGACTCATCCTGCTGGTCGAGAACCGCTGCCGATCGGCGCCCTGCATGTCGGCCAGGTAGCAGTTTACCATGAGTT
CGTAGITGAGCGCCTCGGCCGCGTGGCCTTTGGCACGGAGCTTACCTTTGGAAGTTTTATGGCAGGCGGGGCAGTAG
ATACATTTGAGGGCATACAGCTTGGGCGCGAGGAAAATGGATTCGGGGGAGTATGCATCCGCACCGCAGGAGGCGCA
GACGGTTTCGCACTCCACGAGCCAGGTCAGATCCGGCTCATCGGGGTCAAAAACAAGTTTTCCGCCATGTTTTTTGA
TGCGTTTCTTACCTTTGGTTTCCATGAGTTCGTGTCCCCGCTGGGTGACAAAGAGGCTGTCCGTGTCCCCGTAGACC
GACTTTATGGGCCTGTCCTCGAGCGGAGTGCCTCGGTCCTCTTCGTAGAGGAACCCAGCCCACTCTGATACAAAAGC
GCGTGTCCAGGCCAGCACAAAGGAGGCCACGTGGGAGGGGTAGCGGTCGTTGTCAACCAGGGGGTCCACCTTCTCTA
CGGTATGTAAACACATGTCCCCCTCCTCCACATCCAAGAATGTGATTGGCTTGTAAGTGTAGGCCACGTGACCAGGG
GTCCCCGCCGGGGGGGTATAAAAGTGGGCGGGCCTCTGTTCGTCCTCACTGTCTTCCGGATCACTGTCCAGGAGCGC
CAGCTGTTGGGGTAGGTATTCTCTCTCGAAGGCGGGCATGACCTCTGCACTCAGGTTGTCAGTTTCTAGGAACGAGG
AGGATTTGATATTGACAGTACCAGCAGAGATGCCTTTCATAAGACTCTCGTCCATCTGGTCAGAAAACACAATCTTC
TTGTTATCCAGCTTGGTGGCAAATGATCCATAGAGGGCATTGGATAGAAGCTTGGCGATGGAGCGCATGGTTTGGTT
CTTTTCCTTGTCCGCGCGCTCCTTGGCGGCGATGTTAAGCTGGACGTACTCGCGCGCCACACATTTCCATTCAGGGA
AGATGGTTGTCAGTTCATCCGGAACTATTCTGACTCGCCATCCCCTATTGTGCAGGGTTATCAGATCCACACTGGTG
GCTACCTCGCCTCGGAGGGGCTCATTGGTCCAGCAGAGTCGACCTCCTTTTCTTGAACAGAAAGGGGGGAGGGGGTC
TAGCATGAACTCATCAGGGGGGTCCGCATCTATGGTAAATATTCCCGGTAGCAAATCTTTGTCAAAATAGCTGATGG
TGGCGGGATCATCCAAGGTCATCTGCCATTCTCGAACTGCCAGCGCGCGCTCGTAGGGGTTAAGAGGGGTGCCCCAG
GGCATGGGGTGGGTGAGCGCGGAGGCATACATGCCACAGATATCGTAGACATAGAGGGGCTCTTCGAGGATGCCGAT
GTAAGTGGGATAACAGCGCCCCCCTCTGATGCTTGCTCGCACATAGTCATAGAGTTCATGTGAGGGGGCGAGAAGAC
CCGGGCCCAGATTGGTGCGGTTGGGTTTTTCCGCCCTGTAAACGATCTGGCGAAAGATGGCATGGGAATTGGAAGAG
ATAGTAGGTCTCTGGAATATGTTAAAATGGGCATGAGGTAGGCCTACAGAGTCCCTTATGAAGTGGGCATATGACTC
TTGCAGCTTGGCTACCAGCTCGGCGGTGACGAGTACGTCCAGGGCACAGTAGTCGAGAGTTTCCTGGATGATGTCAT
AACGCGGTTGGCTTTTCTTTTCCCACAGCTCGCGGTTGAGAAGGTATTCTTCGCGATCCTTCCAGTACTCTTCGAGG
GGAAACCCGTCTTTTTCTGCACGGTAAGAGCCCAACATGTAGAACTGATTGACTGCCTTGTAGGGACAGCATCCCTT
CTCCACTGGGAGAGAGTATGCTTGGGCTGCATTGCGCAGCGAGGTATGAGTGAGGGCAAAAGTGTCCCTGACCATGA
CTTTGAGGAATTGATACTTGAAGTCGATGTCATCACAGGCCCCCTGTTCCCAGAGTTGGAAGTCCACCCGCTTCTTG
TAGGCGGGGTTGGGCAAAGCGAAAGTAACATCATTGAAGAGGATCTTGCCGGCCCTGGGCATGAAATTTCGGGTGAT
TCTGAAAGGCTGAGGGACCTCTGCTCGGTTATTGATAACCTGAGCGGCCAAGACGATCTCATCAAAGCCATTGATGT
TGTGCCCCACTATGTACAGTTCTAAGAATCGAGGGGTGCCCCTGACATGAGGCAGCTTCTTGAGTTCTTCAAAAGTG
AGGTCTGTAGGGTCAGTGAGAGCATAGTGTTCGAGGGCCCATTCGTGCACGTGAGGGTTCGCTTTGAGGAAGGAGGA
CCAGAGGTCCACTGCCAGTGCTGTTTGTAACTGGTCCCGGTACTGACGAAAATGCTGCCCGACTGCCATCTTTTCTG
GGGTGACGCAATAGAAGGTTTGGGGGTCCTGCCGCCAGCGATCCCACTTGAGTTTTATGGCCAGGTCATAGGCGATG
TTGACGAGCCGCTGGTCTCCAGAGAGTTTCATGACCAGCATGAAGGGGATTAGCTGCTTGCCAAAGGACCCCATCCA
GGTGTAGGTTTCCACATCGTAGGTGAGGAAGAGCCTTTCTGTGCGAGGATGAGAGCCAATCGGGAAGAACTGGATCT
CCTGCCACCAGTTGGAGGAATGGCTGTTGATGTGATGGAAGTAGAACTCCCTGCGACGCGCCGAGCATTCATGCTTG
TGCTTGTACAGACGGCCGCAGTACTCGCATCGATTCACGGGATGCACCTCATGAATGAGTTGTACCTGACTTCCTTT
GACGAGAAATTTCAGTGGAAAATTGAGGCCTGGCGATTGTACCTCGCGCTCTACTATGTTGTCTGCATCGGCATGAC
CATCTTCTGTCTCGATGGTGGTCATGCTGACGAGCCCTCGCGGGAGGCAAGTCCAGACCTCGGCGCGGCAGGGGCGG
AGCTCGAGGACGAGAGCGCGCAGGCCGGAGCTGTCCAGGGTCCTGAGACGCTGCGGAGTCAGGTTAGTAGGCAGTGT
CAGGAGATTGACTTGCATGATCTTTTCGAGGGCGTGAGGGAGGTTCAGATGGTACTTGATCTCCACGGGTCCGTTGG
TGGAGATGTCGATGGCTTGCAGGGTTCCGTGCCCCTTGGGCGCTACCACCGTGCCCTTGTTTTTCCTTTTGGGCGGC
GGTGGCTCTGTTGCTTCTTGCATGTTTAGAAGCGGTGTCGAGGGCGCGCACCGGGCGGCAGGGGCGGTTCGGGACCC
GGCGGCATGGCCGGCAGTGGTACGTCGGCGCCGCGCGCGGGTAGGTTCTGGTACTGCGCCCTCAGAAGACTCGCATG
CGCCACGACGCGGCGGTTGACATCCTGGATCTGACGCCTCTGGGTGAAAGCTACCGGCCCCGTGAGCTTGAACCTGA
AAGAGAGTTCAACAGAATCAATCTCGGTATCGTTGACGGCGGCTTGCCTAAGGATTTCTTGCACGTCGCCAGAGTTG
TCCTGGTAGGCGATCTCGGCCATGAACTGCTCGATCTCTTCCTCTTGAAGATCTCCGCGGCCCGCTCTCTCGACGGT
GGCCGCGAGGTCGTTGGAGATACGCCCAATGAGTTGAGAGAATGCATTCATGCCCGCCTCGTTCCAGACGCGGCTGT
AGACCACAGCCCCCACGGGATCTCTCGCGCGCATGACCACCTGGGCGAGGTTGAGCTCCACGTGGCGGGTGAAGACC
GCATAGTTGCATAGGCGCTGGAAAAGGTAGTTGAGTGTGGTGGCGATGTGCTCGGTGACGAAGAAATACATGATCCA
TCGTCTCAGCGGCATCTCGCTGACATCGCCCAGCGCTTCCAAGCGCTCCATGGCCTCGTAGAAGTCCACGGCAAAGT
TGAAAAACTGGGAGTTACGCGCGGACACGGTCAACTCTTCTTCCAAAAGACGGATGAGTTCGGCGATGGTGGTGCGC
ACCTCGAGCTCGAAAGCCCCTGGGATTTCTTCCTCAATCTCTTCTTCTTCCACTAACATCTCTTCCTCTTCAGGTGG
GGCTGCAGGAGGAGGGGGAACGCGGCGACGCCGGCGGCGCACGGGCAGACGGTCGATGAATCTTTCAATGACCTCTC
CGCGGCGGCGGCGCATGGTCTCGGTGACGGCACGACCGTTCTCCCTGGGTCTCAGAGTGAAGACGCCTCCGCGCATC
TCCCTGAAGTGGTGACTGGGAGGCTCTCCGTTGGGCAGGGACACCGCGCTGATTATGCATTTTATTAATTGCCCCGT
AGGTACTCCGCGCAAGGACCTGATCGTCTCAAGATCCACGGGATCTGAAAACCTTTCGACGAAAGCGTCTAACCAGT
CGCAATCGCAAGGTAGGCTGAGCACTGTTTCTTGCGGGCGGGGGCGGCTAGACGCTCGGTCGGGGTTCTCTCTTTCT
TCTCCTTCCTCCTCTTTGGAGGGTGAGACGATGCTGCTGGTGATGAAATTAAAATAGGCAGTTTTGAGACGGCGGAT
GGTGGCGAGGAGCACCAGGTCTTTGGGTCCGGCTTGTTGGATGCGCAGGCGATGGGCCATTCCCCAAGCATTATCCT
GACATCTGGCCAGATCTTTATAGTAGTCTTGCATGAGTCGTTCCACGGGCACTTCTTCTTCGCCCGCTCTGCCATGC
ATGCGAGTGATCCCGAACCCGCGCATGGGCTGGACAAGTGCCAGGTCCGCTACAACCCTTTCTGCGAGGATGGCTTG
CTGCACCTGGGTGAGGGTGGCTTGGAAGTCGTCAAAGTCCACGAAGCGGTGGTAAGCCCCGGTGTTGATTGTGTAGG
AGCAGTTGGCCATGACTGACCAGTTGACTGTCTGGTGCCCAGGGCGCACAAGCTCGGTATACTTAAGGCGCGAGTAT
GCGCGGGTGTCAAAGATGTAATCGTTACAGGTGCGCACCAGGTACTGGTAGCCGATGAGAAAGTGCGGCGGCGGCTG
GCGGTATAGGGGCCATCGCTCTGTAGCCGGGGCGCCAGGGGCGAGGTCTTCCAGCATGAGGCGGTGATAACCGTAGA
TGTACCTGGACATCCAGGTGATACCGGAGGCGGTGGTGGATGCCCGCGGGAACTCGCGTACGCGGTTCCAGATGTTG
CGCAGCGGCATGAAGTAGTTCATGGTAGGCACGGTTTGGCCCGTGAGACGTGCACAGTCGTTGATGCTCTAGACATA
CGGGCAAAAACGAAAGCGGTCAGCGGCTCGTCTCCGTGGCCTGGAGGCTAAGCGAACGGGTTGGGCTGCGCGTGTAC
CCCGGTTCGAATCTCGGATCAGGCTGGAGCCGCAGCTAACGTGGTACTGGCACTCCCGTCTCGACCCAGGCCTGCAC
AAAACCTCCAGGATACGGAGGCGGGTCGTTTTTTTTTTTTTGGCTTTTTCCTGGATGGGAGCCAATGCTGCGTCAAG
CTTTAGAACACTCAGTTCTCGGGGCTGGGAGTGGCTCGCGCCCGTAGTCTGGAGAATCAATCGCCAGGGTTGCGTTG
CGGTGTGCCCCGGTTCGAGTCTTAGCGCGCCGGATCGGCCGGTTTCCGCGACAAGCGAGGGTTTGGCAGCCTCGTCA
TTTCTAAGACCCCGCCAGCCGACTTCTCCAGTTTACGGGAGCGAGCCCTCTTTTTTTGTTTTTTTGTTGCCCAGATG
CATCCCGTGCTGCGACAGATGCGCCCCCAGCAACAGCCCCCTTCTCAGCAGCAGCTACAACAACAGCCACAAAAGGC
TCTTCCTGCTCCTGTAACTACTGCGGCTGCAGCCGTCAGCGGCGCGGGGCAGCCCGCCTATGATCTGGACTTGGAAG
AGGGCGAGGGACTGGCGCGCCTGGGCGCACCATCGCCCGAGCGGCACCCGCGGGTGCAACTGAAAAAGGACTCTCGC
GAGGCGTACGTGCCCCAGCAGAACCTGTTCAGGGACAGGAGCGGCGAGGAGCCTGAGGAAATGCGAGCTTCCCGCTT
TAACGCGGGTCGCGAACTGCGTCACGGTCTGGACCGAAGACGGGTGCTGCGTGATGATGATTTTGAAGTCGATGAAG
TGACAGGAATAAGTCCTGCTAGGGCACATGTGGCCGCGGCCAACCTAGTATCAGCTTACGAGCAGACCGTGAAGGAG
GAGCGCAACTTTCAAAAATCTTTCAACAACCATGTGCGCACCCTGATTGCCCGCGAGGAAGTGACACTGGGTCTGAT
GCACCTGTGGGACCTGATGGAAGCCATTACCCAGAACCCCACCAGCAAACCTCTAACCGCTCAGCTGTTTCTGGTGG
TGCAACATAGTAGAGACAATGAGGCATTTAGGGAGGCGCTGTTGAACATTACTGAGCCCGAGGGGAGATGGTTGTAT
GATCTTATCAATATTCTGCAAAGTATAATCGTGCAAGAACGTAGCCTGGGTCTAGCTGAGAAGGTGGCTGCTATTAA
CTACTCGGTCTTGAGCCTGGGCAAGCACTACGCTCGCAAGATCTACAAAACCCCATACGTACCTATAGACAAGGAGG
TGAAGATAGATGGGTTTTATATGCGCATGACTCTCAAGGTGCTGACCTTGAGTGACGATCTGGGAGTGTACCGCAAC
GACAGGATGCACCGCGCAGTGAGCGCCAGCAGAAGGCGTGAGCTGAGCGACAGAGAACTTATGCACAGCTTGCAAAG
AGCTCTGACTGGGGCTGGAACCGAGGGGGAAAACTACTTTGACATGGGAGCGGACTTGCAGTGGCAGCCCAGTCGCA
GGGCCCTGGACGCAGCAGGGTATGAGCTTCCTTACATAGAAGAGGTGGATGAAGGCCAGGATGAGGAGGGCGAGTAT
CTGGAAGACTGATGGCGCGACCATCCATATTTTTGCTAGATGGAACAGCAGGCACCGGACCCCGCAAAACGGGCGGC
GCTACAGAGCCAGCCGTCCGGCATTAACTCCTCGGACGATTGGAGCCAGGCCATGCAACGCATCATGGCGCTGACGA
CCCGCAACCCCGAAGCCTTTAGACAGCAACCCCAGGCCAACCGCCTTTCTGCCATCCTGGAGGCCGTAGTGCCCTCC
CGCTCCAACCCCACACACGAGAAGGTCCTGGCCATCGTGAACGCGCTGGTGGAGAACAAAGCCATACGTCCCGATGA
GGCTGGGCTGGTATACAATGCCCTATTGGAGCGCGTAGCCCGTTACAACAGCAGCAACGTGCAGACCAACCTGGACC
GGATGGTGACCGATGTGCGCGAGGCCGTGTCTCAGCGCGAGCGGTTCCAGCGAGACGCCAATTTAGGGTCGCTGGTG
GCTTTGAACGCCTTCCTCAGCACTCAGCCTGCCAACGTGCCTCGCGGTCAGCAAGACTACACAAACTTTCTAAGTGC
ATTGAGACTCATGGTGGCCGAAGTCCCTCAAAGCGAAGTGTACCAGTCCGGGCCAGACTACTTTTTCCAGACCAGCA
GACAGGGCTTGCAGACAGTGAACCTGAGCCAGGCTTTTAAGAACCTGAATGGTCTGTGGGGAGTGCGCGCCCCAGTG
GGAGATCGGGCGACCGTGTCTAGCTTGCTGACCCCCAACTCCCGCCTACTACTGCTCTTGGTAGCCCCATTCACTGA
CAGCGGTAGCATCGACCGTAATTCGTACTTGGGCTATCTGTTGAACCTGTATCGCGAGGCCATAGGGCAAACTCAGG
TAGATGAGCAAACCTATCAAGAAATTACCCAAGTGAGCCGCGCTCTGGGTCGGGAGGACACTGGCAGCTTGGAAGCC
ACCTTAAACTTCTTGCTGACCAACCGGTCGCAGAAGATCCCTCCTCAGTATTCGCTTACCGCGGAGGAGGAACGGAT
CCTGAGATACGTGCAGCAGAGCGTGGGACTGTTCCTAATGCAGGAGGGGGCGACTCCTACTGCTGCGCTCGATATGA
CAGCCCGAAACATGGAGCCCAGCATGTATGCCAGTAACCGGCCTTTTATCAATAAACTGCTAGACTACTTACACAGG
GCGGCTGCTATGAACTCTGATTATTTCACCAATGCTATCCTGAACCCCCATTGGCTGCCCCCACCTGGGTTCTATAC
GGGCGAGTATGACATGCCCGACCCCAATGACGGGTTTTTATGGGACGATGTGGACAGTAGTGTTTTCTCCCCGCCTC
CTGGTTATAACACTTGGAAGAAGGAAGGTGGCGATAGAAGGCACTCTTCCGTGTCACTGTCCGGAGCAACGGGTGCT
GCAGCGGCTCCCGAGGCCGCAAGTCCTTTCCCTAGTTTGCCATTTTCGCTAAACAGTGTACGCAGCAGTGAGCTGGG
AAGAATAACCCGTCCTCGCTTGATCGGCGAGGAGGAGTATTTGAACGACTCCCTGTTGAGACCCGAGAGGGAGAAGA
ATTTCCCCAACAACGGGATAGAAAGCTTGGTTGACAAAATGAACCGCTGGAAGACGTACGCGCACGATCACAGGGAC
GATCCCCGGGCGCTGGGGGATAGCCGGGGCATCGCTACCCGTAAACGCCAGTGGCACGACAGGCAGCGGGGCCTGGT
GTGGGCCGATGATGATTCCGCCGACGACAGCAGCGTGTTGGACTTGGGTGGGAGTGGTGGTAACCCGTTCGCTCACC
TGCGCCCCCGCGTCGGGCGCCTGATGTAAGAAACCGAAAATAAATACTCACCAAGGCCATGGCGACCAGCGTGCGTT
CGTTTCTTCTCTGTTATAGCTAGTATGATGAGGCGAACCGTGCTAGGCGGAGCGGTGGTGTATCCGGAGGGTCCTCC
TCCTTCGTACGAGAGCGTGATGCAGCAGGCGGCGGCGGCGGCGATGCAGCCACCACTGGAGGCTCCCTTTGTACCCC
CTCGGTACCTGGCACCTACGGAGGGGAGAAACAGCATTCGTTACTCGGAGCTGGCACCATTGTATGATACCACCCGG
TTGTATTTGGTGGACAACAAGTCCGCGGACATCGCCTCACTGAACTATCAGAACGACCACAGCAACTTCCTCACCAC
GGTGGTGCAAAACAATGACTTTACCCCCACGGAGGCCAGCACCCAGACCATCAACTTTGACGAGCGGTCGCGATGGG
GCGGTCAGCTGAAGACTATCATGCACACCAACATGCCCAACGTGAACGAGTACATGTTTAGCAACAAGTTCAAAGCT
CGGGTGATGGTGTCTAGAAAGGCTCCTGAAGGTGTCACAGTAGATGACAATTATGATCACAAGCAGGATATTTTGGA
ATATGAGTGGTTTGAGTTTACTCTACCGGAAGGGAACTTCTCAGCCACAATGACCATTGACCTAATGAACAATGCCA
TCATTGATAATTACCTTGAAGTGGGCAGACAGAATGGAGTGTTGGAGAGTGACATTGGTGTTAAATTTGACACCAGG
AACTTTAGACTGGGTTGGGATCCGGAAACTAAGTTGATTATGCCTGGGGTTTACACCTATGAGGCATTCCATCCTGA
CATTGTATTGTTGCCTGGTTGCGGAGTTGACTTTACTGAAAGTCGCCTTAGTAACTTGCTTGGTATCAGGAAAAGAC
ACCCATTCCAGGAGGGTTTTAAGATCTTGTATGAGGATCTTGAAGGGGGTAATATCCCGGCCCTGTTGGATGTAGAA
GCCTATAAGAACAGTAAGAAAGAACGAGAAGCCAAAACAGAAGCCGCTAAAGCTGCTGCTATTGCTAAAGCCAACAT
AGTTGTCAGCGACCCTGTAAGGGTGGCTAATGCCGAAGAAGTCAGAGGAGACAACTATACAGCTTCATCTGTTGCAA
CTGAAGAATCGCTATTGGCTGCTGTGGCCGAAACTACAGAGACCAAACTCACTATTAAACCTGTAGAAAAAGACAGC
AAGAGTAGAAGTTACAATGTCTTGGAAGATAAAGTGAATACAGCCTACCGCAGCTGGTACCTGTCCTACAACTATGG
TGACCCTGAAAAAGGAGTCCGTTCCTGGACACTGCTCACCACCTCGGATGTCACCTGTGGAGCAGAGCAGGTGTACT
GGTCGCTCCCAGACATGATGCAGGACCCTGTCACATTCCGTTCCACGAGACAAGTCAGCAACTATCCAGTGGTAGGT
GCAGAGCTCATGCCGGTCTTCTCAAAGAGTTTCTACAACGAGCAAGCCGTGTACTCCCAGCAGCTTCGCCAGTCCAC
CTCGCTCACGCACGTCTTCAACCGCTTCCCTGAGAACCAGATCCTCATCCGCCCGCCAGCGCCCACCATTACCACCG
TCAGTGAAAACGTTCCTGCTCTCACAGATCACGGGACCCTGCCGTTGCGCAGCAGTATCCGGGGAGTCCAGCGCGTG
ACCGTTACTGACGCCAGACGCCGCACCTGCCCCTACGTCTACAAGGCCCTGGGCATAGTCGCGCCGCGCGTCCTTTC
AAGCCGCACTTTCTAAAAAAAAATGTCCATTCTTATCTCACCTAGTAATAACACCGGTTGGGGCCTGCGCGCGCCAA
GCAAGATGTACGGAGGTGCTCGCAAACGCTCTACACAGCACCCTGTGCGCGTGCGCGGGCACTTCCGCGCTCCATGG
GGCGCCCTCAAGGGTCGTACCCGCACTAGAACCACCGTCGATGATGTGATCGACCAGGTGGTGGCCGATGCTCGTAA
TTATACTCCTACTGCACCTACATCTACTGTGGATGCAGTTATTGACAGCGTAGTGGCTGACGCCCGCGCCTATGCTC
GCCGGAAGAGCAGGCGGAGACGCATCGCCAGGCGCCACCGGGCTACTCCCGCTATGCGAGCGGCAAGAGCTCTGCTG
AGGAGGGCCAAACGCGTGGGGCGAAGAGCTATGCTTAGAGCGGCCAGACGCGCGGCTTCAGGTGCCAGTGCCGGCAG
GTCCCGCAGGCGCGCAGCCACGGCGGCAGCAGCGGCCATTGCCAACATGGCCCAACCGCGAAGAGGCAATGTGTACT
GGGTGCGCGACGCCACCACCGGCCAGCGCGTGCCCGTGCGCACCCGCCCCCCTCGCTCTTAGAAGATACTGAGCAGT
CTCCGATGTTGTGTCCCAGCGAGGATGTCCAAGCGCAAATACAAGGAAGAGATGCTCCAGGTCATCGCGCCTGAAAT
CTACGGTCCGCCGGTGAAGGATGAAAAAAAGCCCCGCAAAATCAAGCGGGTCAAAAAGGACAAAAAGGAAGAAGATG
GCAATGATGGTCTGGCGGAGTTTGTACGCGAGTTCGCCCCAAGGCGGCGAGTGCAGTGGCGTGGACGCAAAGTGCAG
CCTGTGCTGAGACCTGGAACCACGGTGGTCTTTACGCCCGGCGAGCGCTCCAGCACTGCTTTTAAGCGGTCCTATGA
TGAGGTGTATGGGGATGATGATATTCTGGAGCAGGCGGCCGACCGCCTGGGCGAGTTTGCTTATGGCAAGCGCTCCC
GCTCGAGCCCCAAGGAGGAGGCGGTGTCCATTCCCTTGGACAATGGGAATCCCACCCCTAGTCTCAAGCCAGTCACC
CTGCAGCAAGTGCTGCCCGTGCCTCCACGCAGAGGCAACAAGCGAGAGGGTGAGGATCTGTATCCCACTATGCAATT
GATGGTGCCCAAGCGCCAGCGGCTGGAGGACGTGCTGGAGAAAATGAAAGTGGATCCCGATATACAACCTGAGGTCA
AAGTGAGACCCATCAAGCAGGTGGCGCCAGGTTTGGGAGTACAAACCGTAGACATCAAGATTCCCACCGAGTCAATG
GAAGTCCAAACCGAACCTGCAAAGCCCACAACCACCTCCATTGAGGTGCAAACGGATCCCTGGATGACCGCACCCGT
TACAACTCCAGCTGCTGTCAACACCACTCGAAGATCCCGGCGAAAGTACGGTCCAGCAAGTTTGCTGATGCCAAATT
ATGCTCTGCACCCATCCATTATTCCAACTCCGGGTTACCGAGGCACTCGCTACTACCGCAGCAGGAGCAGCACTTCC
CGCCGTCGCCGCAAAACACCTGCAAGTCGTAGTCATCGTCGTCGCCGCCGCCCCACCAGCAATCTGACTCCCGCTGC
TCTGGTGCGGAGAGTGTATCGCGATGGCCGCGCGGATCCCCTGACGTTACCGCGCGTACGCTACCATCCAAGCATCA
CAACTTAACAACTGTTGCCGCTGCCTCCTTGCAGATATGGCCCTCACTTGCCGCCTTCGTGTCCCCATTACTGGCTA
CCGAGGAAGAAACTCGCGCCGTAGAAGAGGGATGTTGGGGCGCGGAATGCGACGCCACAGGCGGCGGCGCGCTATCA
GCAAGAGGCTGGGGGGTGGCTTTCTGCCTGCTCTGATCCCCATCATAGCCGCGGCGATCGGGGCGATACCAGGCATA
GCTTCCGTGGCGGTTCAGGCCTCGCAGCGCCACTGACATTGGAAAAACTTATAAATAAAACAGAATGGACTCTGATG
CTCCTGGTCCTGTGACTATGTTTTTGTAGAGATGGAAGACATCAATTTTTCATCCCTGGCTCCGCGACACGGCACGA
GGCCGTACATGGGCACCTGGAGCGACATCGGCACCAGCCAACTGAACGGGGGCGCCTTCAATTGGAGCAGTATCTGG
AGCGGGCTTAAAAATTTTGGCTCTACCATAAAAACCTATGGGAACAAAGCTTGGAACAGCAGCACAGGGCAGGCATT
GAAAAATAAGCTTAAAGAGCAAAACTTCCAACAGAAGGTGGTTGATGGAATCGCCTCTGGTATCAATGGGGTGGTGG
ATCTGGCCAACCAGGCCGTGCAGAAACAGATAAACAGCCGCCTTGACCCGCCGCCGTCAGCCCCTGGTGAAATGGAA
GTGGAGGAAGATCTCCCTCCCCTTGAAAAGCGGGGCGACAAGCGTCCGCGCCCCGATCTGGAGGAGACACTAGTCAC
ACGCTCAGACGACCCGCCCTCCTACGAGGAGGCAGTGAAGCTTGGAATGCCCACCACCAGACCTGTAGCCCCCATGG
CTACCGGGGTAATGAAACCTTCTCAGTCACACCGACCCGCTACCTTGGACTTGCCTCCCCCTGCTGTTGCAGCGCCT
GCTCGCAAGCCTGTCGCTACCCCGAAGCCCACCACCGTACAGCCCGTCGCCGTAGCCAGACCGCGTCCTGGGGGCAC
TCCACGTCCGAATGCAAACTGGCAGAGTACTCTGAACAGCATCGTGGGTCTGGGCGTGCAAAGTGTAAAGCGCCGTC
GCTGCTTTTAAATTAAATATGGAGTAGCGCTTAACTTGCCTGTCTGTGTGTATGTGTCATCATCACGCCGCCGCCGC
AGCAACAGCAGAGGAGCAAGGAAGAGGTCGCGCGCCGAGGCTGAGTTGATTTCAAGATGGCCACCCCATCGATGCTG
CCCCAGTGGGCATACATGCACATCGCCGGACAGGATGCTTCGGAGTACCTGAGTCCGGGTCTGGTGCAGTTCGCCCG
CGCCACAGACACCTACTTCAATCTGGGGAACAAGTTTAGGAACCCCACCGTGGCGCCCACCCATGATGTGACCACCG
ACCGCAGTCAGCGGCTGATGCTGCGCTTTGTGCCCGTTGACCGGGAAGACAATACCTACGCATACAAAGTTCGATAC
ACCTTGGCTGTGGGCGACAACAGAGTGCTGGATATGGCCAGCACTTTCTTTGACATTCGGGGTGTGTTGGATAGAGG
TCCTAGCTTCAAGCCATATTCTGGCACTGCTTACAACTCATTGGCCCCTAAGGGCGCTCCCAATACATCTCAGTGGC
TTAATAAGGGAGATGAAGAGGATGGGGAAGACGACCAACAAGCTACATACACTTTTGGCAATGCGCCAGTAAAAGCC
GAAGCTGAAATTACAAAAGAAGGACTGCCAATAGGTTTGGAAGTTCCATCTGAAGGTGGCCCTAAACCCATTTATGC
TGATAAACTGTATCAGCCAGAACCTCAGGTGGGAGAGGAATCTTGGACTGATACGGATGGCACAGATGAAAAATATG
GAGGCAGAGCACTTAAACCTGAAACTAAAATGAAACCCTGCTACGGGTCTTTCGCTAAACCTACTAATGTTAAAGGC
GGGCAGGCAAAAGTGAAGAAAGAAGAAGAAGGCAAGGTTGAATATGACATTGACATGAACTTTTTCGACCTAAGATC
ACAAATGACTGGCCTCAAGCCTAAAATTGTAATGTATGCAGAAAATGTGGATCTAGAAACTCCTGACACTCATGTGG
TGTACAAACCTGGAGCTTCAGATGCTAGCTCTCATGCAAACCTTGGTCAACAGTCCATGCCCAATAGACCTAACTAT
ATTGGCTTCAGGGACAACTTCATCGGACTCATGTACTACAACAGTACTGGCAACATGGGAGTGCTGGCTGGACAAGC
GTCTCAGCTAAATGCAGTGGTTGACTTGCAAGACAGAAACACAGAATTGTCATATCAACTCTTGCTTGATTCTCTGG
GGGACAGAACCAGATATTTCAGTATGTGGAATCAAGCAGTGGATAGCTATGACCCAGATGTGCGTGTTATTGAGAAC
CATGGTGTGGAAGATGAACTTCCTAACTATTGTTTTCCATTGGATGGTGTAGGTCCGCGAATAGACAGTTACAAGGG
AATTGAGACAAATGGTGATGAAACCACTACTTGGAAAGATTTAGAGCCAAAGGGCATAAGTGAAATTGCTAAGGGAA
ATCCGTTTGCCATGGAAATTAACCTCCAAGCTAATCTCTGGAGAAGTTTTCTTTATTCCAATGTGGCTCTGTATCTC
CCAGACTCCTACAAATACACCCCAGCCAATGTCACTCTTCCAACTAACACCAACACTTATGACTACATGAATGGGCG
GGTGGTTCCCCCATCCCTGGTGGATACCTACGTAAACATTGGCGCCAGATGGTCTTTGGATGCCATGGACAATGTCA
ACCCCTTTAACCATCACCGCAACGCTGGCCTGCGATACCGGTCCATGCTTTTGGGCAATGGTCGTTACGTGCCTTTC
CACATTCAAGTGCCTCAGAAATTCTTTGCTGTGAAGAACCTGCTGCTTCTACCCGGTTCTTACACCTACGAGTGGAA
CTTCAGAAAGGATGTGAACATGGTCCTGCAGAGTTCCCTTGGTAATGATCTCCGGGTCGATGGTGCCAGCATAAGTT
TTACCAGCATCAATCTCTATGCCACCTTCTTCCCCATGGCCCACAACACTGCCTCCACCCTTGAAGCCATGCTGCGC
AATGACACCAATGATCAATCATTCAATGACTACCTTTCTGCTGCCAACATGCTCTACCCCATCCCGGCCAACGCTAC
CAACGTTCCCATCTCCATTCCCTCTCGCAACTGGGCCGCCTTCAGAGGCTGGTCCTTCACCAGACTCAAAACCAAGG
AGACTCCCTCTTTGGGATCAGGGTTCGATCCCTACTTTGTTTACTCTGGTTCTATACCCTACCTGGATGGTACCTTC
TACCTTAACCACACTTTCAAGAAAGTCTCCATCATGTTTGACTCTTCAGTGAGCTGGCCTGGTAATGACAGATTGCT
AAGTCCAAATGAGTTCGAAATCAAGCGCACAGTTGATGGGGAAGGCTACAATGTGGCCCAATGTAACATGACCAAAG
ACTGGTTCCTGGTCCAGATGCTTGCCAACTACAACATTGGATACCAGGGCTTCTACGTTCCTGAGGGTTACAAGGAT
CGCATGTACTCCTTCTTCAGAAACTTCCAGCCCATGAGTAGACAGGTGGTTGATGAGATTAACTACAAAGACTATAA
AGCTGTCGCCGTACCCTACCAGCATAATAACTCTGGCTTTGTGGGTTACATGGCTCCTACCATGCGTCAGGGTCAAG
CGTACCCTGCTAACTACCCATACCCCCTAATTGGAACCACTGCAGTAACCAGTGTCACCCAGAAAAAATTCCTGTGC
GACAGGACCATGTGGCGCATCCCATTCTCTAGCAACTTCATGTCCATGGGTGCCCTTACAGACCTGGGACAGAACTT
GCTGTATGCCAACTCGGCCCATGCGCTGGACATGACTTTTGAGGTGGATCCCATGGATGAGCCCACCCTGCTTTATC
TTCTTTTCGAAGTCTTCGACGTGGTCAGAGTGCACCAGCCACACCGCGGCGTCATCGAGGCCGTCTACCTGCGCACA
CCGTTCTCGGCCGGCAACGCCACCACATAAGAAGCCTCTTGCTTCTTGCAAGCAGCAGCTGCAGCCATGTCATGCGG
GTCCGGAAACGGCTCCAGCGAGCAAGAGCTCAAAGCCATCGTCCGAGACCTGGGCTGCGGACCCTATTTCCTGGGAA
CCTTTGACAAGCGTTTCCCGGGGTTCATGGCCCCCGACAAGCTCGCCTGCGCCATAGTCAACACTGCCGGACGCGAG
ACGGGGGGAGAGCACTGGCTGGCTTTTGGTTGGAACCCGCGCTCCAACACCTGCTACCTTTTTGATCCTTTTGGGTT
CTCGGATGAGCGACTCAAACAGATTTACCAGTTTGAGTACGAGGGGCTCCTGCGCCGCAGTGCCCTTGCTACCAAAG
ACCGCTGCATCACCCTGGAAAAGTCCACCCAGAGCGTGCAGGGCCCGCGCTCAGCCGCCTGTGGACTTTTTTGCTGT
ATGTTCCTTCATGCCTTTGTGCACTGGCCCGACCGCCCCATGAACGGAAACCCCACCATGAAGTTGCTGACTGGGGT
GTCAAACAGCATGCTCCAATCACCCCAAGTCCAGCCCACCCTGCGCCGCAACCAGGAGGCGCTATATCGCTTCCTAA
ACACCCACTCATCTTACTTTCGTTCTCACCGCGCACGCATTGAAAGGGCCACCGCGTTTGACCGTATGGATATGCAA
TAAGTCATGTAAAACCGTGTTCAATAAAAAGCATTTTATTTTTACATGCACTAAGGCTCTGGTTTTTTGCTCATTCG
TTTTCATCATTCACTCAGAAATCAAATGGGTTCTGGCGGGAGTCAGAGTGACCCGTGGGCAGGGAGACGTTGCGGAA
CTGTAACCTGTTCTGCCACTTGAACTCGGGGATCACCAGCTTGGGAACTGGAATTTCGGGAAAGGTGTCTTGCCACA
ACTTTCTGGTCAGTTGCAGGGCGCCAAGCAGGTCAGGAGCAGAGATCTTGAAATCACAGTTGGGGCCGGCATTCTGG
ACACGGGAGTTGCGGTACACTGGGTTGCAACACTGGAACACCATCAAGGCTGGGTGTCTCACGCTTGCCAGCACGGT
CGGGTCACTGATGGTAGTCACATCCAAGTCTTCAGCATTGGCCATTCCAAAGGGGGTCATCTTACAGGTCTGCCTGC
CCATCACGGGAGCGCAGCCTGGCTTGTGGTTGCAATCGCAATGAATGGGGATCAGCATCATCCTGGCTTGGTCGGGG
GTTATCCCTGGGTACACGGCCTTCATGAAGGCTTCGTACTGCTTGAAAGCTTCCTGAGCCTTACTTCCCTCGGTGTA
AAACATCCCACAGGACTTGCTGGAAAATTGGTTAGTAGCACAGTTGGCATCATTCACACAGCAGCGGGCATCGTTGT
TGGCCAACTGGACCACATTTCTGCCCCAGCGGTTCTGGGTGATCTTGGCTCTGTCTGGGTTCTCCTTCATAGCGCGC
TGCCCGTTTTCGCTCGCCACATCCATCTCGATAATGTGGTCCTTCTGGATCATGATAGTGCCATGCAGGCATTTCAC
CTTGCCTTCGTAATCGGTGCATCCATGAGCCCACAGAGCGCACCCGGTGCACTCCCAATTATTGTGGGCGATCTCAG
AATAAGAATGCACCAATCCCTGCATGAATCTTCCCATCATCGCTGTCAGGGTCTTCATGCTACTAAATGTCAGCGGG
ATGCCACGGTGCTCCTCGTTCACATACTGGTGGCAGATACGCTTGTACTGCTCGTGCTGCTCTGGCATCAGCTTGAA
AGAGGTTCTCAGGTCATTATCCAGCCTATACCTCTCCATTAGCACAGCCATCACTTCCATGCCCTTCTCCCAGGCAG
ATACCAGGGGCAAGCTCAAAGGATTCCTAACAGCAATAGAAGTAGCTCCTTTAGCTATAGGGTCATTCTTGTCGATC
TTCTCAACACTTCTCTTGCCATCCTTCTCAATGATGCGCACCGGGGGGTAGCTGAAGCCCACGGCCACCAACTGAGC
CTGTTCTCTTTCTTCTTCGCTGTCCTGGCTGATGTCTTGCAGAGGGACATGCTTGGTCTTCCTGGGCTTCTTCTTGG
GAGGGATCGGGGGAGGACTGTTGCTCCGTTCCGGAGACAGGGATGACCGCGAAGTTTCGCTTACCAGTACCACCTGG
CTCTCGATAGAAGAATCGGACCCCACGCGACGGTAGGTGTTCCTCTTCGGGGGCAGAGGTGGAGGCGACTGAGATGG
GCTGCGGTCCGGCCTTGGAGGCGGATGGCTGGCAGAGCCCATTCCGCGTTCGGGGGTGTGCTCCCGTTGGCGGTCGC
TTGACTGATTTCCTCCGCGGCTGGCCATTGTGTTCTCCTAGGCAGAGAAACAACAGACATGGAAACTCAGCCATCAC
TGCCAACATCGCTGCAAGCGCCATCACACCTCGCCCCCAGCAGCGACGAGGAGGAGAGCTTAACCACCCCACCACCC
AGTCCCGCTACCACCACCTCTACCCTCGATGATGAGGAGGAGGTCGACGCAGCCCAGGAGATGCAGGCGCAGGATAA
TGTGAAAGCGGAAGAGATTGAGGCAGATGTCGAGCAGGACCCGGGCTATGTGACACCGGCGGAGCACGAGGAGGAGC
TGAAACGTTTTCTAGACAGAGAGGATGACGACCGCCCAGAGCATCACCAGGAGGCTGGCCTCGGGGATCATGTTGCC
GACTACCTCTCCGGGCTTGGGAGGGAGGACGTGCTCCTCAAACATCTAGCAAGGCAGTCGATCATAGTTAAAGACGC
ACTACTCAACCTCACCGAAGTGCCTATCAGTGTGGAAGAGCTTAGCCGCGCCTACGAGCTGAACCTCTTTTCGCCTC
AGATACCCCCCAAGCGGCAGCGAAACGGCACCTGCGAGGCCAACCCTCGACTCAACTTCTATCCAGCTTTTACTGTC
CCCGAAGTGCTGGCCACCTACCACATCTTTTTTAAGAACCAAAAGATTCCAGTCTCCTGCCGCGCCAACCGCACCCG
CGCAGATGCCCTTCTCAACTTGGGTCCGGGAGCTCGCTTACCTGATATAGCTTCCTTGGAAGAGGTTCCAAAGATCT
TTGAGGGTCTGGGAAGTGATGAGACTCGGGCCGCAAATGCTCTGCAACAGGGAGAGAATGGTATGGATGAACATCAC
AGCGCTCTAGTGGAACTGGAGGGTGACAATGCCCGGCTTGCAGTGCTCAAGCGCAGTATCGTGGTCACCCATTTTGC
CTACCCCGCTGTTAACCTGCCGCCCAAAGTCATGAGCGCTGTCATGGACCATCTGCTCATCAAACGAGCAAGTCCAC
TTTCAGAAAACCAGAACATGCAGGATCCAGACGCCTCGGAGGAGGGCAAGCCGGTAGTCAGTGACGAGCAGCTATCT
CGCTGGCTGGGTACCAACTCCCCCCGAGATTTGGAAGAAAGACGCAAGCTTATGATGGCTGTAGTGCTAGTAACTGT
TGAGTTGGAGTGTCTGCGCCGCTTTTTTACCGACCCCGAGACCCTGCGCAAGCTAGAGGAGAACCTGCACTACACCT
TCAGACATGGCTTCGTGCGCCAGGCATGCAAGATCTCCAACGTGGAGCTCACCAACCTGGTTTCATACATGGGCATT
TTGCATGAGAACCGGCTAGGGCAGAGCGTTCTGCACACCACCCTGAAGGGGGAGGCCCGCCGCGACTACATCCGAGA
CTGTGTCTACCTCTACCTCTGCCATACCTGGCAGACTGGTATGGGTGTGTGGCAACAGTGTTTGGAAGAGCAGAACC
TTAAAGAGCTGGACAAGCTCTTGCAGAGATCCCTCAAAGCCCTGTGGACAGGTTTTGACGAGCGCACCGTCGCCTCG
GACCTGGCGGACATCATCTTCCCCGAGCGTCTTAGGGTTACTCTGCGAAACGGCCTGCCAGACTTCATGAGCCAGAG
CATGCTTAACAACTTTCGCTCTTTCATCCTGGAACGCTCCGGTATCCTGCCTGCCACCTGCTGTGCGCTGCCCTCCG
ACTTTGTGCCTCTCACCTACCGCGAGTGCCCACCGCCGCTATGGAGCCACTGCTACCTATTCCGCCTGGCCAACTAC
CTCTCCTACCACTCGGATGTGATAGAGGATGTGAGCGGAGACGGCCTGCTGGAATGCCACTGCCGATGCAATTTATG
CACACCCCACCGCTCCCTCGCCTGCAACCCCCAGTTGCTAAGCGAGACCCAGATCATCGGCACCTTCGAGTTGCAGG
GTCCCAACAGTGAAGGCGAGGGGTCTTCTCCGGGGCAGAGTCTGAAACTGACACCGGGGCTGTGGACCTCCGCCTAC
CTGCGCAAGTTTCATCCCGAGGACTATCATCCCTATGAGATCAGGTTCTATGAGGACCAGTCACATCCTCCCAAAGT
CGAGCTCTCAGCCTGCGTCATCACCCAGGGGGCAATTCTGGCCCAATTGCAAGCCATCCAAAAATCCCGCCAAGAAT
TTCTGCTGAAAAAGGGAAGCGGGGTCTACCTTGACCCCCAGACCGGTGAGGAGCTCAACACAAGGTTCCCCCAGGAT
GTCCCATCGCCGAGGAAGCAAGAAGCTGAAGGTGCAGCTGTCACCCCCAGAGGATATGGAGGAAGACTGGGACAGTC
AGGCAGAGGAGGAGATGGAAGATTGGGACAGCCAGGCAGAGGAGGTGGACAGCCTGGAGGAAGACAGTTTGGAGGAG
GAAGACGAGGAGGCAGAGGAGGTGGAAGAAGCAACCGCCGCCAAACAGTTGTCATCGGCGGCGGAGACAAGCAAGTC
CCCAGACAGCAGCACGGCTACCATCTCCGCTCCGGGTCGGGGGGCCCAGCGGCGGCCCAACAGTAGATGGGACGAGA
CCGGGCGATTTCCAAACCCGACCACCGCTTCCAAGACCGGTAAGAAGGAGCGACAGGGATACAAGTCCTGGCGTGGA
CATAAAAACGCTATCATCTCCTGCTTGCATGAATGCGGGGGCAACATATCCTTCACCCGGCGATACCTGCTTTTCCA
CCACGGTGTGAACTTCCCCCGCAATATCTTGCATTACTACCGTCACCTCCACAGCCCCTACTGCAGTCAGCAAGTCC
CGGCAACCCCGACAGAAAAAGACAGCAGCGACAACGGTGACCAGAAAAGCAGCAGTTAGAAAATCCACAACAAGTGC
AGCAGGAGGAGGACTGAGGATCACAGCGAACGAGCCAGCGCAGACCAGAGAGCTGAGGAACCGGATCTTTCCAACCC
TCTATGCCATCTTCCAGCAGAGTCGGGGGCAAGAGCAGGAATTGAAAGTAAAAAACCGATCTCTGCGCTCGCTCACC
AGAAGTTGTTTGTATCACAAGAGCGAAGACCAACTTCAGCGCACTCTCGAGGACGCCGAGGCTCTCTTCAACAAGTA
CTGCGCGCTGACTCTTAAAGAGTAGCCCTTGCCCGCGCTCATTCGAAAACGGCGGGAATCACGTCACCCTTGGCAGC
TGTCCTTTGCCCTCGTCATGAGTAAAGAGATTCCCACGCCTTACATGTGGAGCTATCAGCCCCAAATGGGGTTGGCA
GCAGGTGCTTCCCAGGACTACTCCACCCGCATGAATTGGCTTAGCGCCGGGCCCTCAATGATATCACGGGTTAATGA
TATACGAGCTTATCGAAACCAGTTACTCCTAGAACAGTCAGCTCTTACCACCACACCCCGCCAACACCTTAATCCCC
GAAATTGGCCCGCCGCCCTGGTGTACCAGGAAAATCCCGCTCCCACCACCGTACTACTTCCTCGAGACGCCCAGGCC
GAAGTTCAGATGACTAACGCAGGTGTACAGCTGGCGGGCGGTTCCGCCCTATGTCGTCACCGGCCTCAACAGAGTAT
AAAACGCCTGGTGATCAGAGGCCGAGGTATCCAGCTCAACGACGAGTCGGTTAGCTCTTCGCTTGGTCTGCGACCAG
ACGGAGTCTTCCAGATCGCCGGCTGTGGGAGATCTTCCTTCACTCCTCGTCAGGCTGTGCTGACTTTGGAGAGTTCG
TCCTCGCAGCCCCGCTCGGGCGGCATCGGAACTCTCCAGTTTGTGGAGGAGTTTACTCCCTCTGTCTACTTCAACCC
CTTCTCCGGCTCTCCTGGCCAGTACCCGGACGAGTTCATACCGAACTTCGACGCAATCAGCGAGTCAGTGGATGGCT
ATGATTGATGTCTAATGGTGGCGCGGCTGAGCTAGCTCGACTGCGACACCTAGACCACTGCCGCCGCTTTCGCTGTT
TCGCCCGGGAACTCACCGAGTTCATCTACTTCGAACTCTCCGAGGAGCACCCTCAGGGTCCGGCCCACGGAGTGCGG
ATTACCATCGAAGGGGGAATAGACTCTCGCCTGCATCGCATCTTCTCCCAGCGGCCCGTGCTGATTGAGCGCGACCA
GGGAAATACAACCATCTCCATCTACTGCATCTGTAACCACCCCGGATTGCATGAAAGCCTTTGCTGTCTTGTTTGTG
CTGAGTTTAATAAAAACTGAGTTAAGACCTTCCTACGGACTACCGCTTCTTCAATCAGGACTTTACAACACCAACCA
GATCTTCCAGAAGACCCAGACCCTTCCTCCTCTGATCCAGGACTCTAACTCTACCTTACCAGCACCCTCCACTACTA
ACCTTCCCGAAACTAACAAGCTTGGATCTCATCTGCAACACCGCCTTTCACGAAGCCTTCTTTCTGCCAATACTACC
ACTCCCAAAACCGGAGGTGAGCTCCGCGGTCTTCCTACTGACGACCCCTGGGTGGTAGCGGGTTTTGTAACGTTAGG
ATTAGTTGCGGGTGGGCTTGTGCTAATCCTTTGCTACCTATACACACCTTGCTGTGCATATTTAGTCATATTGTGCT
GTTGGTTTAAGAAATGGGGGCCATACTAGTCGTGCTTGCTTTACTTTCGCTTTTGGGTCTGGGCTCTGCTAATCTCA
ATCCTCTTGATCACAATCCATGTCTAGACTTCGACCCAGAAAATTGCACACTTACTTTTGCACCCGACACAAGCCGT
CTCTGTGGAGTTCTTATTAAGTGCGGATGGGACTGCAGGTCCGTTGAAATTACACATAATAACAAAACATGGAACAA
TACCTTATCCACCACATGGGAGCCAGGAGTTCCCGAGTGGTATACTGTCTCTGTCCGAGGTCCTGACGGTTCCATTC
GCATTAGTAACAACACTTTCATTTTTTCTGAAATGTGCGATCTGGCCATGTTTATGAGCAAACAGTATGACCTATGG
CCTCCTAGCAAAGAGAACATTGTGGCATTTTCCATTGCTTATTGCTTGGTAACATGCATCATCACTGCTATCATTTG
TGTGTGCATACACTTGCTTATAGTTATTCGCCCTAGACAAAGCAATGAGGAAAAAGAGAAAATGCCTTAACCTTTTT
CCTCATACCTTTTCTTTACAGCATGGCTTCTGTTACAGCTCTAATTATTGCCAGCATTGTCACTGTCGCTCACGGGC
AAACAATTGTCCATATTACCTTAGGACATAATCACACTCTTGTAGGGCCCCCAATTACTTCAGAGGTTATTTGGACC
AAACTTGGAAGTGTTGATTATTTTGATATAATTTGCAACAAAACTGAACCAATATTTGTAATCTGTAACAGACAAAA
TCTCACGTTAATTAATGTTAGCAAAATTTATAACGGTTACTATTATGGTTATGATAGATCCAGTAGCCAATATAAAA
ATTACTTAGTTCGCATAACTCAGCCCAAATCAACAGTGCCAACTATGACAATAATTAAAATGGCTAATAAAGCATTA
GAAAATTTTACATTACCAACAACGCCCAATGAAAAAAACATTCCAAATTCAATGATTGCAATTATTGCGGCGGTGGC
ATTGGGAATGGCACTAATAATAATATGCATGTTCCTATATGCTTGTTGCTATAAAAAGTTTCAACATAAACAGGATC
CACTACTAAATTTTAACATTTAATTTTTTATACAGATGATTTCCACTACAATTTTTATCATTACTAGCCTTGCAGCT
GTAACTTATGGCCGTTCACACCTAACTGTACCTGTTGGCTCAACATGTACACTACAAGGACCCCAAGAAGGCTATGT
CACTTGGTGGAGAATATATGATAATGGAGGGTTCGCTAGACCATGTGATCAGCCTGGTACAAAATTTTCATGCAACG
GAAGAGACTTGACCATTATTAACATAACATTAAATGAGCAAGGCTTCTATTATGGAACCAACTATAAAAATAGTTTA
GATTACAACATTATTGTAGTGCCAGCCACCACTTCTGCTCCCCGCAAATCCACTTTCTCTAGCAGCAGTGCCAAAGC
AAGCACAATTCCTAAAACAGCTTCTGCTATGTTAAAGCTTCGAAAAATCGCTTTAAGTAATTCCACAGCAGCTCCCA
ATACAATTCCTAAATCAACAATTGGCATCATTACTGCCGTGGTAGTGGGATTAATGATTATATTTTTGTGCATAATG
TACTACGCCTGCTGCTATAGAAAACATGAACAAAAAGGTGATGCATTACTAAATTTTGATATTTAATTTTTTATAGA
ATTATGATATTGTTTCAATCCAATGCCACTAACACTATCAATGTGCAGACTACTTTAAAACATGACATGGAAAACCA
CACTACCTCCTATGCATACACAAATATTCAGCCTAAATACGCTATGCAACTAGAAATCACCATACTAATTGTAATTG
GAATTCTTATACTATCTGTTATTCTTTATTTTATATTCTGCCGTCAAATACCCAATGTTCATAGAAATTCTAAAAGA
CGTCCCATCTATTCTCCTATGATTAGTCGTCCCCATATGGCTCTGAATGAAATCTAAGATCTTTTTTTTTCTTTTAC
AGTATGGTGAACATCAATCATGATTCCTAGAAATTTCTTCTTCACCATACTCATCTGTGCTTTCAATGTCTGTGCTA
CTTTCACAGCAGTAGCCACTGCAAGCCCAGACTGTATAGGACCATTTGCTTCCTATGCACTTTTTGCCTTTGTTACT
TGCATCTGCGTGTGTAGCATAGTCTGCCTGGTTATTAATTTTTTCCAACTGGTAGACTGGATCTTTGTGCGAATTGC
CTACCTACGTCACCATCCCGAATACCGCAATCAAAATGTTGCGGCACTTCTTAGGCTTATTTAAAACCATGCAGGCT
ATGCTACCAGTTATTTTAATTCTGCTACTACCCTGCATTGCCCTACCTTCCACCGCCACTCGCGCTACACCTGAACA
ACTTAGAAAATGCAAATTTCAACAACCATGGTCATTTCTTGATTGCTACCATGAAAAATCTGATTTTCCCACATACT
GGATAGTGATTGTTGGAATAATTAACATACTTTCATGTACCTTTTTCTCAATCACAATATACCCCACATTTAATTTT
GGGTGGAATTCTCCCAATGCACTGGGTTACCCACAAGAGCTAGATGAACATATCCCACTACAACACATACAACAACC
ACTAGCATTGGTAGAGTATGAAAATGAGCCACAACCTTCACTGCCTCCTGCTATTAGTTACTTCAACCTAACCGGCG
GAGATGACTGAAATACTCACCACCTCCAATTCCGCCGAGGATCTGCTTGATATGGACGGCCGCGCCTCAGAACAGCG
ACTCGCCCAACTACGCATCCGCCAGCAGCAGGAACGCGTGACCAAAGAGCTCAGAGATGTCATCCAAATTCACCAAT
GCAAAAAAGGCATATTTTGTTTGGTAAAACAAGCCAAGATATCCTACGAGATCACCGCTACTGACCATCGCCTCTCT
TACGAACTTGGCCCCCAACGACAAAAATTTACATGCATGGTGGGAATCAACCCTATAGTTATCACCCAGCAAAGTGG
AGATACTAAGGGTTGCATTCACTGCTCTTGCGATTCCACCGAGTGCACCTACACCCTGCTGAAGACCCTATGCGGCC
TAAGAGACCTGCTACCCATGAATTAAAAATTAATAAAAAATTACTTACTTGAAATCAGCAATAAGGTCTCTGTTGAA
ATTTTTTCCCAGCAGCACCTCGCTTCCCTCTTCCCAACTCTGGTATTCTAAACCCCGTTCAGCGGCATACTTTCTCC
ATACTTTAAAGGGGATGTCAAATTTTAGCTCCTCTCCTGTACCCACGATCTTCATGTCTTTCTTCCCAGATGACCAA
GAGAGTCCGGCTCAGTGATTCCTTCAACCCTGTCTACCCCTATGAAGACGAAAGCACCTCCCAACACCCCTTTATAA
ACCCAGGGTTTATTTCCCCAAATGGCTTTACACAAAGCCCAGACGGAGTTCTTACTTTAAATTGTTTAACCCCACTA
ACAACCACAGGCGGGCCTTTACAGTTAAAAGTGGGAGGGGGACTTATAGTGGATGACACTGATGGGACCTTACAAGA
AAACATACGTGTTACAGCACCCATTACTAAAAATAATCATTCTGTAGAACTATCCATTGGAAATGGATTAGAAACAC
AAAACAATAAACTATGTGCCAAATTGGGAAATGGGTTAAAATTTAACAACGGTGACATTTGTATAAAGGATAGTATT
AACACCTTATGGACTGGAATAAAGCCTCCACCTAACTGTCAAATAGTGGAAAACACTGATACAAACGATGGCAAACT
TACTTTAGTATTAGTAAAAAACGGAGGACTTGTTAATGGCTACGTATCTCTAGTTGGTGTATCAGACACTGTGAACC
AAATGTTCACACAAAAGTCAGCAACCATACAATTAAGATTATATTTCGACTCTTCTGGAAATCTATTAACTGATGAA
TCAAACTTAAAAATTCCACTTAAAAATAAATCTTCTACAGCAACCAGTGAAGCTGCAACCAGCAGCAAAGCCTTTAT
GCCAAGTACTACAGCTTATCCCTTTAACACCACTACTAGGGATAGTGAAAACTATATTCATGGAATATGTTACTATA
TGACTAGTTATGATAGAAGTCTAGTTCCCTTAAACATTTCTATAATGCTAAACAGCCGTACGATTTCTTCCAATGTT
GCCTATGCCATACAATTTGAATGGAATCTAAATGCAAAAGAATCTCCAGAAAGCAACATAGCTACGCTGACCACATC
CCCCTTTTTCTTTTCTTATATTAGAGAAGACGACAACTAAAAAATAAAGTTTAAGTGTTTTTATTTAAAAATCACAA
AATTCGAGTAGTTATTTTGCCTCCCCCTTCCCATTTAACAGAATACACCAATCTCTCCCCACGCACAGCTTTAAACA
TTTGGATACCATTAGAGATAGACATAGTTTTAGTTTCCACATTCCAAACAGTTTCAGAGCGAGCCAATCIGGGGTCA
GTGATACATAAAAATGCATCGGGATAGTCTTTTAAAGCGCTTTCACAGTCCAACTGCTGCGGATGCGACTCCGGAGT
CTGGATCACAGTCATCTGGAAGAAGAACGATGGGAATCATAATCCGAAAACGGAATCGGGCGATTGTGTCTCATCAA
ACCCACAAGCAGCCGCTGTCTGCGTCGCTCCGTGCGACTGCTGTTTATGGGATCGGGGTCTGCAGTGTCCTGAAGCA
TGATTTTAATAGCCCTTAACATTAACTTTCTGGTGCGATGCGCGCAGCAACGCATTCTGATTTCACTGAGATTACTA
CAGTATGTACAGCACATTATCACAATATTGTTTAATAAACCATAATTAAAAGCGCTCCAGCCAAAACTCATATCTGA
TACAATCGCCCCTGCATGACCATCATACCAAATTTTAATATAAATTAAATGTCGTTCCCTCAAAAACACACTACCCA
CATACATGATCTCTTTTGGCATGTGCATATTAACAATCTGTCTGTACCATGGACAACGTTGGTTAATCATGCAACCC
AATATAACCTTCCGGAACCACACTGCCAACACCGCTCCCCCAGCCATGCATTGAAGTGAACCCTGCTGATTACAATG
ACAATGAAGAACCCAATTCTCTCGACCATGAATCACTTGAGACTGAAAAATATCTATAGTAGCACAACAAAGACATA
AATGCATGCATCTTCTCATAATTTTTAACTCATCTGGATTTAAAAACATATCCCAAGGAATGGGAAACTCTTGCAAA
ACAGTAAAGCTGGCAGAACAAGGAAGACCACGAACACAACTTACACTATGCATAGTCATAGTATCACAATCTGGCAA
CAGCGGGTGGTCTTCAGTCATAGAAGCTCGGGTTTCATTTTCCTCACATCGTGGTAACTGGGCTCTGGTGTAAGGGT
GATGTCTGGCGCATGATGTCGAGCGTGCGCGCAACCTTGTCATAATGGAGTTGTTTCCTGACATTCTCGTATTTTGT
ATAGCAAAACGCGGCCCTGGCACAACACACTCTTCTTCGTCTTCTATCCTGCCGCTTAGTGTGTTCCGTCTGATAAT
TCAAGTACAGCCACACTCTTAAGTTGGTCAAAAGAATGCTGGCTTCAGTTGTAATCAAAACTCCATCATATTTAATT
GTTCTAAGGAAATCATCCACGGTAGCATATGCAAATCCCAACCAAGCAATGCAACTGGATTGCGTTTCAAGCAGCAG
AGGAGAGGGAAGAGACGGAAGAATCATGTTAATTTTTATTCCAAACGATCTCGCAGTACTTCAAATTGTAGATCGCG
CAGATGGCATCTATCGCCCCCACTGTGTTGGTGAAAAAGCACAGCTAAATCAAAAGAAATGCGATTTTCAAGGTGCT
CAACGGTGGCTTCCAACAAAGCCTCCACGCGCACATCCAAAAACAAAAGAATACCAAAAGAAGGAGCATTTTCTAAC
TCCTCAAACATCATATTACATTCCTGCACCATTCCCAGATAATTTTCAGCTTTCCAGCCTTGAATTATTCGTGTCAG
TTCTTGTGGTAAATCCAAACCACACATTACAAACAGGTCCCGGAGGGCGCCCTCCACCACCATTCTTAAACACACCC
TCATAATGACAAAATATCTTGCTCCTGTGTCACCTGTAGCAAATTAAGAATGGCATCATCAATTGACATGCCCTTGG
CTCTAAGTTCTTCTCTAAGTTCTAGTTGTAAATACTCTCTCATATTATCACCAAACTGCTTAGCCAAAAGCCCCCCG
GGAACAATAGCAGGGGACGCTACAGTGCAGTACAAGCGCAGACCTCCCCAATTGGCTCCAGCAAAAACAAGATTAGA
ATAAGCATACTGGGAACCACCAGTAATATCATCAAAGTTGCTGGAAATATAATCAGGCAGAATTTCTTGTAAAAATT
GAATAAAAGAAAAATTTTCCAAAGAAACATTCAAAATCTCTGGGATGCAAATGCAATAGGTTACCGCGCTGCGCTCC
AACATTGTTAGTTTTGAATTAGTCTGCAAAATAAAAGAAACAAGCGTCATATCATAGTAGCCTGTCGAACAGGTGGA
TAAATCAGTCTTTCCATCACAAGACAAGCCACAGGGTCTCCAGCTCGACCCTCGTAAAACCTGTCATCGTGATTAAA
CAACAGCACCGAAAGTTCCTCGCGGTGGCCAGCATGAATAATTCTTGATGAAGCATATAATCCAGACATGTTAGCAT
CAGTTAAAGAGAAAAAACAGCCAACATAGCCTCTGGGTATAATTATGCTTAATCTTAAGTATAGCAAAGCCACCCCT
CGCGGATACAAAGTAAAAGGCACAGGAGAATAAAAAATATAATTATTTCTCTGCTGCTGTTCAGGCAACGTCGCCCC
CGGTCCATCTAAATACACATACAAAGCCTCATCAGCCATGGCTTACCAGACAAAGTACAGCGGGCGCACAAAGCACA
AGCTCTAAAGAAGCTCTAAAGACACTCTTCAACCTCTCCACAATATATACACAAGCCCTAAACTGACGTAATGGGAG
TAAAGTGTAAAAAATCCCGCCAAGCCCAACACACACCCCGAAACTGCGTCAGCAGGGAAAAGTACAGTTTCACTTCC
GCATTCCCAACAAGCGTAAGTTCCTCTTTCTCATGGTACGTCACATCCGATTAACTTGCAACGTCATTTTCCCACGG
TCGCACCGCCCCTTTTAGCCGTTCACCCCGCAGCCAATCACCACACAGCGCGCACTTTTTTAAATTACCTCATTTAC
ATATTGGCACCATTCCATCTATAAGGTATATTATATTGATTG

GenBank Accession No. AAW33547 (SEQ ID NO: 238)

MTKRVRLSDSFNPVYPYEDESTSQHPFINPGFISPNGFTQSPDGVLTLNCLTPLTTTGGPLQLKVGGGLIVDDTDGT
LQENIRVTAPITKNNHSVELSIGNGLETONNKLCAKLGNGLKFNNGDICIKDSINTLWTGIKPPPNCQIVENTDIND
GKLTLVLVKNGGLVNGYVSLVGVSDTVNQMFTQKSATIQLRLYFDSSGNLLTDESNLKIPLKNKSSTATSEAATSSK
AFMPSTTAYPFNTTTRDSENYIHGICYYMTSYDRSLVPLNISIMLNSRTISSNVAYAIQFEWNLNAKESPESNIATL
TTSPFFFSYIREDDN

GenBank Accession No. AAW33525 (SEQ ID NO: 239)

MRRTVLGGAVVYPEGPPPSYESVMQQAAAAAMQPPLEAPFVPPRYLAPTEGRNSIRYSELAPLYDTTRLYLVDNKSA
DIASLNYQNDHSNFLTTVVONNDFTPTEASTQTINFDERSRWGGQLKTIMHTNMPNVNEYMFSNKFKARVMVSRKAP
EGVTVDDNYDHKQDILEYEWFEFTLPEGNFSATMTIDLMNNAIIDNYLEVGRONGVLESDIGVKFDTRNFRLGWDPE
TKLIMPGVYTYEAFHPDIVLLPGCGVDFTESRLSNLLGIRKRHPFQEGFKILYEDLEGGNIPALLDVEAYKNSKKER
EAKTEAAKAAAIAKANIVVSDPVRVANAEEVRGDNYTASSVATEESLLAAVAETTETKLTIKPVEKDSKSRSYNVLE
DKVNTAYRSWYLSYNYGDPEKGVRSWTLLTTSDVTCGAEQVYWSLPDMMQDPVTFRSTRQVSNYPVVGAELMPVFSK
SFYNEQAVYSQQLRQSTSLTHVFNRFPENQILIRPPAPTITTVSENVPALTDHGTLPLRSSIRGVQRVTVTDARRRT
CPYVYKALGIVAPRVLSSRTF

GenBank Accession No. AAW33530 (SEQ ID NO: 240)

MATPSMLPQWAYMHIAGQDASEYLSPGLVQFARATDTYFNLGNKFRNPTVAPTHDVTTDRSQRLMLRFVPVDREDNT
YAYKVRYTLAVGDNRVLDMASTFFDIRGVLDRGPSFKPYSGTAYNSLAPKGAPNTSQWLNKGDEEDGEDDQQATYTF
GNAPVKAEAEITKEGLPIGLEVPSEGGPKPIYADKLYQPEPQVGEESWTDTDGTDEKYGGRALKPETKMKPCYGSFA
KPTNVKGGQAKVKKEEEGKVEYDIDMNFFDLRSQMTGLKPKIVMYAENVDLETPDTHVVYKPGASDASSHANLGQQS
MPNRPNYIGFRDNFIGLMYYNSTGNMGVLAGOASQLNAVVDLQDRNTELSYQLLLDSLGDRTRYFSMWNQAVDSYDP
DVRVIENHGVEDELPNYCFPLDGVGPRIDSYKGIETNGDETTTWKDLEPKGISEIAKGNPFAMEINLQANLWRSFLY
SNVALYLPDSYKYTPANVTLPTNTNTYDYMNGRVVPPSLVDTYVNIGARWSLDAMDNVNPFNHHRNAGLRYRSMLLG
NGRYVPFHIQVPQKFFAVKNLLLLPGSYTYEWNFRKDVNMVLQSSLGNDLRVDGASISFTSINLYATFFPMAHNTAS
TLEAMLRNDTNDQSFNDYLSAANMLYPIPANATNVPISIPSRNWAAFRGWSFTRLKTKETPSLGSGFDPYFVYSGSI
PYLDGTFYLNHTFKKVSIMFDSSVSWPGNDRLLSPNEFEIKRTVDGEGYNVAQCNMTKDWFLVQMLANYNIGYQGFY
VPEGYKDRMYSFFRNFQPMSRQVVDEINYKDYKAVAVPYQHNNSGFVGYMAPTMRQGQAYPANYPYPLIGTTAVTSV
TQKKFLCDRTMWRIPFSSNFMSMGALTDLGQNLLYANSAHALDMTFEVDPMDEPTLLYLLFEVFDVVRVHQPHRGVI
EAVYLRTPFSAGNATT

GenBank Accession No. AC_000008 (SEQ ID NO: 208)

CATCATCAATAATATACCTTATTTTGGATTGAAGCCAATATGATAATGAGGGGGTGGAGTTTGTGACGTGGCGCGGG
GCGTGGGAACGGGGCGGGTGACGTAGTAGTGTGGCGGAAGTGTGATGTTGCAAGTGTGGCGGAACACATGTAAGCGA
CGGATGTGGCAAAAGTGACGTTTTTGGTGTGCGCCGGTGTACACAGGAAGTGACAATTTTCGCGCGGTTTTAGGCGG
ATGTTGTAGTAAATTTGGGCGTAACCGAGTAAGATTTGGCCATTTTCGCGGGAAAACTGAATAAGAGGAAGTGAAAT
CTGAATAATTTTGTGTTACTCATAGCGCGTAATATTTGTCTAGGGCCGCGGGGACTTTGACCGTTTACGTGGAGACT
CGCCCAGGTGTTTTTCTCAGGTGTTTTCCGCGTTCCGGGTCAAAGTTGGCGTTTTATTATTATAGTCAGCTGACGTG
TAGTGTATTTATACCCGGTGAGTTCCTCAAGAGGCCACTCTTGAGTGCCAGCGAGTAGAGTTTTCTCCTCCGAGCCG
CTCCGACACCGGGACTGAAAATGAGACATATTATCTGCCACGGAGGTGTTATTACCGAAGAAATGGCCGCCAGTCTT
TTGGACCAGCTGATCGAAGAGGTACTGGCTGATAATCTTCCACCTCCTAGCCATTTTGAACCACCTACCCTTCACGA
ACTGTATGATTTAGACGTGACGGCCCCCGAAGATCCCAACGAGGAGGCGGTTTCGCAGATTTTTCCCGACTCTGTAA
TGTTGGCGGTGCAGGAAGGGATTGACTTACTCACTTTTCCGCCGGCGCCCGGTTCTCCGGAGCCGCCTCACCTTTCC
CGGCAGCCCGAGCAGCCGGAGCAGAGAGCCTTGGGTCCGGTTTCTATGCCAAACCTTGTACCGGAGGTGATCGATCT
TACCTGCCACGAGGCTGGCTTTCCACCCAGTGACGACGAGGATGAAGAGGGTGAGGAGTTTGTGTTAGATTATGTGG
AGCACCCCGGGCACGGTTGCAGGTCTTGTCATTATCACCGGAGGAATACGGGGGACCCAGATATTATGTGTTCGCTT
TGCTATATGAGGACCTGTGGCATGTTTGTCTACAGTAAGTGAAAATTATGGGCAGTGGGTGATAGAGTGGTGGGTTT
GGTGTGGTAATTTTTTTTTTAATTTTTACAGTTTTGTGGTTTAAAGAATTTTGTATTGTGATTTTTTTAAAAGGTCC
TGTGTCTGAACCTGAGCCTGAGCCCGAGCCAGAACCGGAGCCTGCAAGACCTACCCGCCGTCCTAAAATGGCGCCTG
CTATCCTGAGACGCCCGACATCACCTGTGTCTAGAGAATGCAATAGTAGTACGGATAGCTGTGACTCCGGTCCTTCT
AACACACCTCCTGAGATACACCCGGTGGTCCCGCTGTGCCCCATTAAACCAGTTGCCGTGAGAGTTGGTGGGCGTCG
CCAGGCTGTGGAATGTATCGAGGACTTGCTTAACGAGCCTGGGCAACCTTTGGACTTGAGCTGTAAACGCCCCAGGC
CATAAGGTGTAAACCTGTGATTGCGTGTGTGGTTAACGCCTTTGTTTGCTGAATGAGTTGATGTAAGTTTAATAAAG
GGTGAGATAATGTTTAACTTGCATGGCGTGTTAAATGGGGCGGGGCTTAAAGGGTATATAATGCGCCGTGGGCTAAT
CTTGGTTACATCTGACCTCATGGAGGCTTGGGAGTGTTTGGAAGATTTTTCTGCTGTGCGTAACTTGCTGGAACAGA
GCTCTAACAGTACCTCTTGGTTTTGGAGGTTTCTGTGGGGCTCATCCCAGGCAAAGTTAGTCTGCAGAATTAAGGAG
GATTACAAGTGGGAATTTGAAGAGCTTTTGAAATCCTGTGGTGAGCTGTTTGATTCTTTGAATCTGGGTCACCAGGC
GCTTTTCCAAGAGAAGGTCATCAAGACTTTGGATTTTTCCACACCGGGGCGCGCTGCGGCTGCTGTTGCTTTTTTGA
GTTTTATAAAGGATAAATGGAGCGAAGAAACCCATCTGAGCGGGGGGTACCTGCTGGATTTTCTGGCCATGCATCTG
TGGAGAGCGGTTGTGAGACACAAGAATCGCCTGCTACTGTTGTCTTCCGTCCGCCCGGCGATAATACCGACGGAGGA
GCAGCAGCAGCAGCAGGAGGAAGCCAGGCGGCGGCGGCAGGAGCAGAGCCCATGGAACCCGAGAGCCGGCCTGGACC
CTCGGGAATGAATGTTGTACAGGTGGCTGAACTGTATCCAGAACTGAGACGCATTTTGACAATTACAGAGGATGGGC
AGGGGCTAAAGGGGGTAAAGAGGGAGCGGGGGGCTTGTGAGGCTACAGAGGAGGCTAGGAATCTAGCTTTTAGCTTA
ATGACCAGACACCGTCCTGAGTGTATTACTTTTCAACAGATCAAGGATAATTGCGCTAATGAGCTTGATCTGCTGGC
GCAGAAGTATTCCATAGAGCAGCTGACCACTTACTGGCTGCAGCCAGGGGATGATTTTGAGGAGGCTATTAGGGTAT
ATGCAAAGGTGGCACTTAGGCCAGATTGCAAGTACAAGATCAGCAAACTTGTAAATATCAGGAATTGTTGCTACATT
TCTGGGAACGGGGCCGAGGTGGAGATAGATACGGAGGATAGGGTGGCCTTTAGATGTAGCATGATAAATATGTGGCC
GGGGGTGCTTGGCATGGACGGGGTGGTTATTATGAATGTAAGGTTTACTGGCCCCAATTTTAGCGGTACGGTTTTCC
TGGCCAATACCAACCTTATCCTACACGGTGTAAGCTTCTATGGGTTTAACAATACCTGTGTGGAAGCCTGGACCGAT
GTAAGGGTTCGGGGCTGTGCCTTTTACTGCTGCTGGAAGGGGGTGGTGTGTCGCCCCAAAAGCAGGGCTTCAATTAA
GAAATGCCTCTTTGAAAGGTGTACCTTGGGTATCCTGTCTGAGGGTAACTCCAGGGTGCGCCACAATGTGGCCTCCG
ACTGTGGTTGCTTCATGCTAGTGAAAAGCGTGGCTGTGATTAAGCATAACATGGTATGTGGCAACTGCGAGGACAGG
GCCTCTCAGATGCTGACCTGCTCGGACGGCAACTGTCACCTGCTGAAGACCATTCACGTAGCCAGCCACTCTCGCAA
GGCCTGGCCAGTGTTTGAGCATAACATACTGACCCGCTGTTCCTTGCATTTGGGTAACAGGAGGGGGGTGTTCCTAC
CTTACCAATGCAATTTGAGTCACACTAAGATATTGCTTGAGCCCGAGAGCATGTCCAAGGTGAACCTGAACGGGGTG
TTTGACATGACCATGAAGATCTGGAAGGTGCTGAGGTACGATGAGACCCGCACCAGGTGCAGACCCTGCGAGTGTGG
CGGTAAACATATTAGGAACCAGCCTGTGATGCTGGATGTGACCGAGGAGCTGAGGCCCGATCACTTGGTGCTGGCCT
GCACCCGCGCTGAGTTTGGCTCTAGCGATGAAGATACAGATTGAGGTACTGAAATGTGTGGGCGTGGCTTAAGGGTG
GGAAAGAATATATAAGGTGGGGGTCTTATGTAGTTTTGTATCTGTTTTGCAGCAGCCGCCGCCGCCATGAGCACCAA
CTCGTTTGATGGAAGCATTGTGAGCTCATATTTGACAACGCGCATGCCCCCATGGGCCGGGGTGCGTCAGAATGTGA
TGGGCTCCAGCATTGATGGTCGCCCCGTCCTGCCCGCAAACTCTACTACCTTGACCTACGAGACCGTGTCTGGAACG
CCGTTGGAGACTGCAGCCTCCGCCGCCGCTTCAGCCGCTGCAGCCACCGCCCGCGGGATTGTGACTGACTTTGCTTT
CCTGAGCCCGCTTGCAAGCAGTGCAGCTTCCCGTTCATCCGCCCGCGATGACAAGTTGACGGCTCTTTTGGCACAAT
TGGATTCTTTGACCCGGGAACTTAATGTCGTTTCTCAGCAGCTGTTGGATCTGCGCCAGCAGGTTTCTGCCCTGAAG
GCTTCCTCCCCTCCCAATGCGGTTTAAAACATAAATAAAAAACCAGACTCTGTTTGGATTTGGATCAAGCAAGTGTC
TTGCTGTCTTTATTTAGGGGTTTTGCGCGCGCGGTAGGCCCGGGACCAGCGGTCTCGGTCGTTGAGGGTCCTGTGTA
TTTTTTCCAGGACGTGGTAAAGGTGACTCTGGATGTTCAGATACATGGGCATAAGCCCGTCTCTGGGGTGGAGGTAG
CACCACTGCAGAGCTTCATGCTGCGGGGTGGTGTTGTAGATGATCCAGTCGTAGCAGGAGCGCTGGGCGTGGTGCCT
AAAAATGTCTTTCAGTAGCAAGCTGATTGCCAGGGGCAGGCCCTTGGTGTAAGTGTTTACAAAGCGGTTAAGCTGGG
ATGGGTGCATACGTGGGGATATGAGATGCATCTTGGACTGTATTTTTAGGTTGGCTATGTTCCCAGCCATATCCCTC
CGGGGATTCATGTTGTGCAGAACCACCAGCACAGTGTATCCGGTGCACTTGGGAAATTTGTCATGTAGCTTAGAAGG
AAATGCGTGGAAGAACTTGGAGACGCCCTTGTGACCTCCAAGATTTTCCATGCATTCGTCCATAATGATGGCAATGG
GCCCACGGGCGGCGGCCTGGGCGAAGATATTTCTGGGATCACTAACGTCATAGTTGTGTTCCAGGATGAGATCGTCA
TAGGCCATTTTTACAAAGCGCGGGCGGAGGGTGCCAGACTGCGGTATAATGGTTCCATCCGGCCCAGGGGCGTAGTT
ACCCTCACAGATTTGCATTTCCCACGCTTTGAGTTCAGATGGGGGGATCATGTCTACCTGCGGGGCGATGAAGAAAA
CGGTTTCCGGGGTAGGGGAGATCAGCTGGGAAGAAAGCAGGTTCCTGAGCAGCTGCGACTTACCGCAGCCGGTGGGC
CCGTAAATCACACCTATTACCGGGTGCAACTGGTAGTTAAGAGAGCTGCAGCTGCCGTCATCCCTGAGCAGGGGGGC
CACTTCGTTAAGCATGTCCCTGACTCGCATGTTTTCCCTGACCAAATCCGCCAGAAGGCGCTCGCCGCCCAGCGATA
GCAGTTCTTGCAAGGAAGCAAAGTTTTTCAACGGTTTGAGACCGTCCGCCGTAGGCATGCTTTTGAGCGTTTGACCA
AGCAGTTCCAGGCGGTCCCACAGCTCGGTCACCTGCTCTACGGCATCTCGATCCAGCATATCTCCTCGTTTCGCGGG
TTGGGGCGGCTTTCGCTGTACGGCAGTAGTCGGTGCTCGTCCAGACGGGCCAGGGTCATGTCTTTCCACGGGCGCAG
GGTCCTCGTCAGCGTAGTCTGGGTCACGGTGAAGGGGTGCGCTCCGGGCTGCGCGCTGGCCAGGGTGCGCTTGAGGC
TGGTCCTGCTGGTGCTGAAGCGCTGCCGGTCTTCGCCCTGCGCGTCGGCCAGGTAGCATTTGACCATGGTGTCATAG
TCCAGCCCCTCCGCGGCGTGGCCCTTGGCGCGCAGCTTGCCCTTGGAGGAGGCGCCGCACGAGGGGCAGTGCAGACT
TTTGAGGGCGTAGAGCTTGGGCGCGAGAAATACCGATTCCGGGGAGTAGGCATCCGCGCCGCAGGCCCCGCAGACGG
TCTCGCATTCCACGAGCCAGGTGAGCTCTGGCCGTTCGGGGTCAAAAACCAGGTTTCCCCCATGCTTTTTGATGCGT
TTCTTACCTCTGGTTTCCATGAGCCGGTGTCCACGCTCGGTGACGAAAAGGCTGTCCGTGTCCCCGTATACAGACTT
GAGAGGCCTGTCCTCGAGCGGTGTTCCGCGGTCCTCCTCGTATAGAAACTCGGACCACTCTGAGACAAAGGCTCGCG
TCCAGGCCAGCACGAAGGAGGCTAAGTGGGAGGGGTAGCGGTCGTTGTCCACTAGGGGGTCCACTCGCTCCAGGGTG
TGAAGACACATGTCGCCCTCTTCGGCATCAAGGAAGGTGATTGGTTTGTAGGTGTAGGCCACGTGACCGGGTGTTCC
TGAAGGGGGGCTATAAAAGGGGGTGGGGGCGCGTTCGTCCTCACTCTCTTCCGCATCGCTGTCTGCGAGGGCCAGCT
GTTGGGGTGAGTACTCCCTCTGAAAAGCGGGCATGACTTCTGCGCTAAGATTGTCAGTTTCCAAAAACGAGGAGGAT
TTGATATTCACCTGGCCCGCGGTGATGCCTTTGAGGGTGGCCGCATCCATCTGGTCAGAAAAGACAATCTTTTTGTT
GTCAAGCTTGGTGGCAAACGACCCGTAGAGGGCGTTGGACAGCAACTTGGCGATGGAGCGCAGGGTTTGGTTTTTGT
CGCGATCGGCGCGCTCCTTGGCCGCGATGTTTAGCTGCACGTATTCGCGCGCAACGCACCGCCATTCGGGAAAGACG
GTGGTGCGCTCGTCGGGCACCAGGTGCACGCGCCAACCGCGGTTGTGCAGGGTGACAAGGTCAACGCTGGTGGCTAC
CTCTCCGCGTAGGCGCTCGTTGGTCCAGCAGAGGCGGCCGCCCTTGCGCGAGCAGAATGGCGGTAGGGGGTCTAGCT
GCGTCTCGTCCGGGGGGTCTGCGTCCACGGTAAAGACCCCGGGCAGCAGGCGCGCGTCGAAGTAGTCTATCTTGCAT
CCTTGCAAGTCTAGCGCCTGCTGCCATGCGCGGGCGGCAAGCGCGCGCTCGTATGGGTTGAGTGGGGGACCCCATGG
CATGGGGTGGGTGAGCGCGGAGGCGTACATGCCGCAAATGTCGTAAACGTAGAGGGGCTCTCTGAGTATTCCAAGAT
ATGTAGGGTAGCATCTTCCACCGCGGATGCTGGCGCGCACGTAATCGTATAGTTCGTGCGAGGGAGCGAGGAGGTCG
GGACCGAGGTTGCTACGGGCGGGCTGCTCTGCTCGGAAGACTATCTGCCTGAAGATGGCATGTGAGTTGGATGATAT
GGTTGGACGCTGGAAGACGTTGAAGCTGGCGTCTGTGAGACCTACCGCGTCACGCACGAAGGAGGCGTAGGAGTCGC
GCAGCTTGTTGACCAGCTCGGCGGTGACCTGCACGTCTAGGGCGCAGTAGTCCAGGGTTTCCTTGATGATGTCATAC
TTATCCTGTCCCTTTTTTTTCCACAGCTCGCGGTTGAGGACAAACTCTTCGCGGTCTTTCCAGTACTCTTGGATCGG
AAACCCGTCGGCCTCCGAACGGTAAGAGCCTAGCATGTAGAACTGGTTGACGGCCTGGTAGGCGCAGCATCCCTTTT
CTACGGGTAGCGCGTATGCCTGCGCGGCCTTCCGGAGCGAGGTGTGGGTGAGCGCAAAGGTGTCCCTGACCATGACT
TTGAGGTACTGGTATTTGAAGTCAGTGTCGTCGCATCCGCCCTGCTCCCAGAGCAAAAAGTCCGTGCGCTTTTTGGA
ACGCGGATTTGGCAGGGCGAAGGTGACATCGTTGAAGAGTATCTTTCCCGCGCGAGGCATAAAGTTGCGTGTGATGC
GGAAGGGTCCCGGCACCTCGGAACGGTTGTTAATTACCTGGGCGGCGAGCACGATCTCGTCAAAGCCGTTGATGTTG
TGGCCCACAATGTAAAGTTCCAAGAAGCGCGGGATGCCCTTGATGGAAGGCAATTTTTTAAGTTCCTCGTAGGTGAG
CTCTTCAGGGGAGCTGAGCCCGTGCTCTGAAAGGGCCCAGTCTGCAAGATGAGGGTTGGAAGCGACGAATGAGCTCC
ACAGGTCACGGGCCATTAGCATTTGCAGGTGGTCGCGAAAGGTCCTAAACTGGCGACCTATGGCCATTTTTTCTGGG
GTGATGCAGTAGAAGGTAAGCGGGTCTTGTTCCCAGCGGTCCCATCCAAGGTTCGCGGCTAGGTCTCGCGCGGCAGT
CACTAGAGGCTCATCTCCGCCGAACTTCATGACCAGCATGAAGGGCACGAGCTGCTTCCCAAAGGCCCCCATCCAAG
TATAGGTCTCTACATCGTAGGTGACAAAGAGACGCTCGGTGCGAGGATGCGAGCCGATCGGGAAGAACTGGATCTCC
CGCCACCAATTGGAGGAGTGGCTATTGATGTGGTGAAAGTAGAAGTCCCTGCGACGGGCCGAACACTCGTGCTGGCT
TTTGTAAAAACGTGCGCAGTACTGGCAGCGGTGCACGGGCTGTACATCCTGCACGAGGTTGACCTGACGACCGCGCA
CAAGGAAGCAGAGTGGGAATTTGAGCCCCTCGCCTGGCGGGTTTGGCTGGTGGTCTTCTACTTCGGCTGCTTGTCCT
TGACCGTCTGGCTGCTCGAGGGGAGTTACGGTGGATCGGACCACCACGCCGCGCGAGCCCAAAGTCCAGATGTCCGC
GCGCGGCGGTCGGAGCTTGATGACAACATCGCGCAGATGGGAGCTGTCCATGGTCTGGAGCTCCCGCGGCGTCAGGT
CAGGCGGGAGCTCCTGCAGGTTTACCTCGCATAGACGGGTCAGGGCGCGGGCTAGATCCAGGTGATACCTAATTTCC
AGGGGCTGGTTGGTGGCGGCGTCGATGGCTTGCAAGAGGCCGCATCCCCGCGGCGCGACTACGGTACCGCGCGGCGG
GCGGTGGGCCGCGGGGGTGTCCTTGGATGATGCATCTAAAAGCGGTGACGCGGGCGAGCCCCCGGAGGTAGGGGGGG
CTCCGGACCCGCCGGGAGAGGGGGCAGGGGCACGTCGGCGCCGCGCGCGGGCAGGAGCTGGTGCTGCGCGCGTAGGT
TGCTGGCGAACGCGACGACGCGGCGGTTGATCTCCTGAATCTGGCGCCTCTGCGTGAAGACGACGGGCCCGGTGAGC
TTGAGCCTGAAAGAGAGTTCGACAGAATCAATTTCGGTGTCGTTGACGGCGGCCTGGCGCAAAATCTCCTGCACGTC
TCCTGAGTTGTCTTGATAGGCGATCTCGGCCATGAACTGCTCGATCTCTTCCTCCTGGAGATCTCCGCGTCCGGCTC
GCTCCACGGTGGCGGCGAGGTCGTTGGAAATGCGGGCCATGAGCTGCGAGAAGGCGTTGAGGCCTCCCTCGTTCCAG
ACGCGGCTGTAGACCACGCCCCCTTCGGCATCGCGGGCGCGCATGACCACCTGCGCGAGATTGAGCTCCACGTGCCG
GGCGAAGACGGCGTAGTTTCGCAGGCGCTGAAAGAGGTAGTTGAGGGTGGTGGCGGTGTGTTCTGCCACGAAGAAGT
ACATAACCCAGCGTCGCAACGTGGATTCGTTGATATCCCCCAAGGCCTCAAGGCGCTCCATGGCCTCGTAGAAGTCC
ACGGCGAAGTTGAAAAACTGGGAGTTGCGCGCCGACACGGTTAACTCCTCCTCCAGAAGACGGATGAGCTCGGCGAC
AGTGTCGCGCACCTCGCGCTCAAAGGCTACAGGGGCCTCTTCTTCTTCTTCAATCTCCTCTTCCATAAGGGCCTCCC
CTTCTTCTTCTTCTGGCGGCGGTGGGGGAGGGGGGACACGGCGGCGACGACGGCGCACCGGGAGGCGGTCGACAAAG
CGCTCGATCATCTCCCCGCGGCGACGGCGCATGGTCTCGGTGACGGCGCGGCCGTTCTCGCGGGGGCGCAGTTGGAA
GACGCCGCCCGTCATGTCCCGGTTATGGGTTGGCGGGGGGCTGCCATGCGGCAGGGATACGGCGCTAACGATGCATC
TCAACAATTGTTGTGTAGGTACTCCGCCGCCGAGGGACCTGAGCGAGTCCGCATCGACCGGATCGGAAAACCTCTCG
AGAAAGGCGTCTAACCAGTCACAGTCGCAAGGTAGGCTGAGCACCGTGGCGGGCGGCAGCGGGCGGCGGTCGGGGTT
GTTTCTGGCGGAGGTGCTGCTGATGATGTAATTAAAGTAGGCGGTCTTGAGACGGCGGATGGTCGACAGAAGCACCA
TGTCCTTGGGTCCGGCCTGCTGAATGCGCAGGCGGTCGGCCATGCCCCAGGCTTCGTTTTGACATCGGCGCAGGTCT
TTGTAGTAGTCTTGCATGAGCCTTTCTACCGGCACTTCTTCTTCTCCTTCCTCTTGTCCTGCATCTCTTGCATCTAT
CGCTGCGGCGGCGGCGGAGTTTGGCCGTAGGTGGCGCCCTCTTCCTCCCATGCGTGTGACCCCGAAGCCCCTCATCG
GCTGAAGCAGGGCTAGGTCGGCGACAACGCGCTCGGCTAATATGGCCTGCTGCACCTGCGTGAGGGTAGACTGGAAG
TCATCCATGTCCACAAAGCGGTGGTATGCGCCCGTGTTGATGGTGTAAGTGCAGTTGGCCATAACGGACCAGTTAAC
GGTCTGGTGACCCGGCTGCGAGAGCTCGGTGTACCTGAGACGCGAGTAAGCCCTCGAGTCAAATACGTAGTCGTTGC
AAGTCCGCACCAGGTACTGGTATCCCACCAAAAAGTGCGGCGGCGGCTGGCGGTAGAGGGGCCAGCGTAGGGTGGCC
GGGGCTCCGGGGGCGAGATCTTCCAACATAAGGCGATGATATCCGTAGATGTACCTGGACATCCAGGTGATGCCGGC
GGCGGTGGTGGAGGCGCGCGGAAAGTCGCGGACGCGGTTCCAGATGTTGCGCAGCGGCAAAAAGTGCTCCATGGTCG
GGACGCTCTGGCCGGTCAGGCGCGCGCAATCGTTGACGCTCTAGACCGTGCAAAAGGAGAGCCTGTAAGCGGGCACT
CTTCCGTGGTCTGGTGGATAAATTCGCAAGGGTATCATGGCGGACGACCGGGGTTCGAGCCCCGTATCCGGCCGTCC
GCCGTGATCCATGCGGTTACCGCCCGCGTGTCGAACCCAGGTGTGCGACGTCAGACAACGGGGGAGTGCTCCTTTTG
GCTTCCTTCCAGGCGCGGCGGCTGCTGCGCTAGCTTTTTTGGCCACTGGCCGCGCGCAGCGTAAGCGGTTAGGCTGG
AAAGCGAAAGCATTAAGTGGCTCGCTCCCTGTAGCCGGAGGGTTATTTTCCAAGGGTTGAGTCGCGGGACCCCCGGT
TCGAGTCTCGGACCGGCCGGACTGCGGCGAACGGGGGTTTGCCTCCCCGTCATGCAAGACCCCGCTTGCAAATTCCT
CCGGAAACAGGGACGAGCCCCTTTTTTGCTTTTCCCAGATGCATCCGGTGCTGCGGCAGATGCGCCCCCCTCCTCAG
CAGCGGCAAGAGCAAGAGCAGCGGCAGACATGCAGGGCACCCTCCCCTCCTCCTACCGCGTCAGGAGGGGCGACATC
CGCGGTTGACGCGGCAGCAGATGGTGATTACGAACCCCCGCGGCGCCGGGCCCGGCACTACCTGGACTTGGAGGAGG
GCGAGGGCCTGGCGCGGCTAGGAGCGCCCTCTCCTGAGCGGTACCCAAGGGTGCAGCTGAAGCGTGATACGCGTGAG
GCGTACGTGCCGCGGCAGAACCTGTTTCGCGACCGCGAGGGAGAGGAGCCCGAGGAGATGCGGGATCGAAAGTTCCA
CGCAGGGCGCGAGCTGCGGCATGGCCTGAATCGCGAGCGGTTGCTGCGCGAGGAGGACTTTGAGCCCGACGCGCGAA
CCGGGATTAGTCCCGCGCGCGCACACGTGGCGGCCGCCGACCTGGTAACCGCATACGAGCAGACGGTGAACCAGGAG
ATTAACTTTCAAAAAAGCTTTAACAACCACGTGCGTACGCTTGTGGCGCGCGAGGAGGTGGCTATAGGACTGATGCA
TCTGTGGGACTTTGTAAGCGCGCTGGAGCAAAACCCAAATAGCAAGCCGCTCATGGCGCAGCTGTTCCTTATAGTGC
AGCACAGCAGGGACAACGAGGCATTCAGGGATGCGCTGCTAAACATAGTAGAGCCCGAGGGCCGCTGGCTGCTCGAT
TTGATAAACATCCTGCAGAGCATAGTGGTGCAGGAGCGCAGCTTGAGCCTGGCTGACAAGGTGGCCGCCATCAACTA
TTCCATGCTTAGCCTGGGCAAGTTTTACGCCCGCAAGATATACCATACCCCTTACGTTCCCATAGACAAGGAGGTAA
AGATCGAGGGGTTCTACATGCGCATGGCGCTGAAGGTGCTTACCTTGAGCGACGACCTGGGCGTTTATCGCAACGAG
CGCATCCACAAGGCCGTGAGCGTGAGCCGGCGGCGCGAGCTCAGCGACCGCGAGCTGATGCACAGCCTGCAAAGGGC
CCTGGCTGGCACGGGCAGCGGCGATAGAGAGGCCGAGTCCTACTTTGACGCGGGCGCTGACCTGCGCTGGGCCCCAA
GCCGACGCGCCCTGGAGGCAGCTGGGGCCGGACCTGGGCTGGCGGTGGCACCCGCGCGCGCTGGCAACGTCGGCGGC
GTGGAGGAATATGACGAGGACGATGAGTACGAGCCAGAGGACGGCGAGTACTAAGCGGTGATGTTTCTGATCAGATG
ATGCAAGACGCAACGGACCCGGCGGTGCGGGCGGCGCTGCAGAGCCAGCCGTCCGGCCTTAACTCCACGGACGACTG
GCGCCAGGTCATGGACCGCATCATGTCGCTGACTGCGCGCAATCCTGACGCGTTCCGGCAGCAGCCGCAGGCCAACC
GGCTCTCCGCAATTCTGGAAGCGGTGGTCCCGGCGCGCGCAAACCCCACGCACGAGAAGGTGCTGGCGATCGTAAAC
GCGCTGGCCGAAAACAGGGCCATCCGGCCCGACGAGGCCGGCCTGGTCTACGACGCGCTGCTTCAGCGCGTGGCTCG
TTACAACAGCGGCAACGTGCAGACCAACCTGGACCGGCTGGTGGGGGATGTGCGCGAGGCCGTGGCGCAGCGTGAGC
GCGCGCAGCAGCAGGGCAACCTGGGCTCCATGGTTGCACTAAACGCCTTCCTGAGTACACAGCCCGCCAACGTGCCG
CGGGGACAGGAGGACTACACCAACTTTGTGAGCGCACTGCGGCTAATGGTGACTGAGACACCGCAAAGTGAGGTGTA
CCAGTCTGGGCCAGACTATTTTTTCCAGACCAGTAGACAAGGCCTGCAGACCGTAAACCTGAGCCAGGCTTTCAAAA
ACTTGCAGGGGCTGTGGGGGGTGCGGGCTCCCACAGGCGACCGCGCGACCGTGTCTAGCTTGCTGACGCCCAACTCG
CGCCTGTTGCTGCTGCTAATAGCGCCCTTCACGGACAGTGGCAGCGTGTCCCGGGACACATACCTAGGTCACTTGCT
GACACTGTACCGCGAGGCCATAGGTCAGGCGCATGTGGACGAGCATACTTTCCAGGAGATTACAAGTGTCAGCCGCG
CGCTGGGGCAGGAGGACACGGGCAGCCTGGAGGCAACCCTAAACTACCTGCTGACCAACCGGCGGCAGAAGATCCCC
TCGTTGCACAGTTTAAACAGCGAGGAGGAGCGCATTTTGCGCTACGTGCAGCAGAGCGTGAGCCTTAACCTGATGCG
CGACGGGGTAACGCCCAGCGTGGCGCTGGACATGACCGCGCGCAACATGGAACCGGGCATGTATGCCTCAAACCGGC
CGTTTATCAACCGCCTAATGGACTACTTGCATCGCGCGGCCGCCGTGAACCCCGAGTATTTCACCAATGCCATCTTG
AACCCGCACTGGCTACCGCCCCCTGGTTTCTACACCGGGGGATTCGAGGTGCCCGAGGGTAACGATGGATTCCTCTG
GGACGACATAGACGACAGCGTGTTTTCCCCGCAACCGCAGACCCTGCTAGAGTTGCAACAGCGCGAGCAGGCAGAGG
CGGCGCTGCGAAAGGAAAGCTTCCGCAGGCCAAGCAGCTTGTCCGATCTAGGCGCTGCGGCCCCGCGGTCAGATGCT
AGTAGCCCATTTCCAAGCTTGATAGGGTCTCTTACCAGCACTCGCACCACCCGCCCGCGCCTGCTGGGCGAGGAGGA
GTACCTAAACAACTCGCTGCTGCAGCCGCAGCGCGAAAAAAACCTGCCTCCGGCATTTCCCAACAACGGGATAGAGA
GCCTAGTGGACAAGATGAGTAGATGGAAGACGTACGCGCAGGAGCACAGGGACGTGCCAGGCCCGCGCCCGCCCACC
CGTCGTCAAAGGCACGACCGTCAGCGGGGTCTGGTGTGGGAGGACGATGACTCGGCAGACGACAGCAGCGTCCTGGA
TTTGGGAGGGAGTGGCAACCCGTTTGCGCACCTTCGCCCCAGGCTGGGGAGAATGTTTTAAAAAAAAAAAAGCATGA
TGCAAAATAAAAAACTCACCAAGGCCATGGCACCGAGCGTTGGTTTTCTTGTATTCCCCTTAGTATGCGGCGCGCGG
CGATGTATGAGGAAGGTCCTCCTCCCTCCTACGAGAGTGTGGTGAGCGCGGCGCCAGTGGCGGCGGCGCTGGGTTCT
CCCTTCGATGCTCCCCTGGACCCGCCGTTTGTGCCTCCGCGGTACCTGCGGCCTACCGGGGGGAGAAACAGCATCCG
TTACTCTGAGTTGGCACCCCTATTCGACACCACCCGTGTGTACCTGGTGGACAACAAGTCAACGGATGTGGCATCCC
TGAACTACCAGAACGACCACAGCAACTTTCTGACCACGGTCATTCAAAACAATGACTACAGCCCGGGGGAGGCAAGC
ACACAGACCATCAATCTTGACGACCGGTCGCACTGGGGCGGCGACCTGAAAACCATCCTGCATACCAACATGCCAAA
TGTGAACGAGTTCATGTTTACCAATAAGTTTAAGGCGCGGGTGATGGTGTCGCGCTTGCCTACTAAGGACAATCAGG
TGGAGCTGAAATACGAGTGGGTGGAGTTCACGCTGCCCGAGGGCAACTACTCCGAGACCATGACCATAGACCTTATG
AACAACGCGATCGTGGAGCACTACTTGAAAGTGGGCAGACAGAACGGGGTTCTGGAAAGCGACATCGGGGTAAAGTT
TGACACCCGCAACTTCAGACTGGGGTTTGACCCCGTCACTGGTCTTGTCATGCCTGGGGTATATACAAACGAAGCCT
TCCATCCAGACATCATTTTGCTGCCAGGATGCGGGGTGGACTTCACCCACAGCCGCCTGAGCAACTTGTTGGGCATC
CGCAAGCGGCAACCCTTCCAGGAGGGCTTTAGGATCACCTACGATGATCTGGAGGGTGGTAACATTCCCGCACTGTT
GGATGTGGACGCCTACCAGGCGAGCTTGAAAGATGACACCGAACAGGGCGGGGGTGGCGCAGGCGGCAGCAACAGCA
GTGGCAGCGGCGCGGAAGAGAACTCCAACGCGGCAGCCGCGGCAATGCAGCCGGTGGAGGACATGAACGATCATGCC
ATTCGCGGCGACACCTTTGCCACACGGGCTGAGGAGAAGCGCGCTGAGGCCGAAGCAGCGGCCGAAGCTGCCGCCCC
CGCTGCGCAACCCGAGGTCGAGAAGCCTCAGAAGAAACCGGTGATCAAACCCCTGACAGAGGACAGCAAGAAACGCA
GTTACAACCTAATAAGCAATGACAGCACCTTCACCCAGTACCGCAGCTGGTACCTTGCATACAACTACGGCGACCCT
CAGACCGGAATCCGCTCATGGACCCTGCTTTGCACTCCTGACGTAACCTGCGGCTCGGAGCAGGTCTACTGGTCGTT
GCCAGACATGATGCAAGACCCCGTGACCTTCCGCTCCACGCGCCAGATCAGCAACTTTCCGGTGGTGGGCGCCGAGC
TGTTGCCCGTGCACTCCAAGAGCTTCTACAACGACCAGGCCGTCTACTCCCAACTCATCCGCCAGTTTACCTCTCTG
ACCCACGTGTTCAATCGCTTTCCCGAGAACCAGATTTTGGCGCGCCCGCCAGCCCCCACCATCACCACCGTCAGTGA
AAACGTTCCTGCTCTCACAGATCACGGGACGCTACCGCTGCGCAACAGCATCGGAGGAGTCCAGCGAGTGACCATTA
CTGACGCCAGACGCCGCACCTGCCCCTACGTTTACAAGGCCCTGGGCATAGTCTCGCCGCGCGTCCTATCGAGCCGC
ACTTTTTGAGCAAGCATGTCCATCCTTATATCGCCCAGCAATAACACAGGCTGGGGCCTGCGCTTCCCAAGCAAGAT
GTTTGGCGGGGCCAAGAAGCGCTCCGACCAACACCCAGTGCGCGTGCGCGGGCACTACCGCGCGCCCTGGGGCGCGC
ACAAACGCGGCCGCACTGGGCGCACCACCGTCGATGACGCCATCGACGCGGTGGTGGAGGAGGCGCGCAACTACACG
CCCACGCCGCCACCAGTGTCCACAGTGGACGCGGCCATTCAGACCGTGGTGCGCGGAGCCCGGCGCTATGCTAAAAT
GAAGAGACGGCGGAGGCGCGTAGCACGTCGCCACCGCCGCCGACCCGGCACTGCCGCCCAACGCGCGGCGGCGGCCC
TGCTTAACCGCGCACGTCGCACCGGCCGACGGGCGGCCATGCGGGCCGCTCGAAGGCTGGCCGCGGGTATTGTCACT
GTGCCCCCCAGGTCCAGGCGACGAGCGGCCGCCGCAGCAGCCGCGGCCATTAGTGCTATGACTCAGGGTCGCAGGGG
CAACGTGTATTGGGTGCGCGACTCGGTTAGCGGCCTGCGCGTGCCCGTGCGCACCCGCCCCCCGCGCAACTAGATTG
CAAGAAAAAACTACTTAGACTCGTACTGTTGTATGTATCCAGCGGCGGCGGCGCGCAACGAAGCTATGTCCAAGCGC
AAAATCAAAGAAGAGATGCTCCAGGTCATCGCGCCGGAGATCTATGGCCCCCCGAAGAAGGAAGAGCAGGATTACAA
GCCCCGAAAGCTAAAGCGGGTCAAAAAGAAAAAGAAAGATGATGATGATGAACTTGACGACGAGGTGGAACTGCTGC
ACGCTACCGCGCCCAGGCGACGGGTACAGTGGAAAGGTCGACGCGTAAAACGTGTTTTGCGACCCGGCACCACCGTA
GTCTTTACGCCCGGTGAGCGCTCCACCCGCACCTACAAGCGCGTGTATGATGAGGTGTACGGCGACGAGGACCTGCT
TGAGCAGGCCAACGAGCGCCTCGGGGAGTTTGCCTACGGAAAGCGGCATAAGGACATGCTGGCGTTGCCGCTGGACG
AGGGCAACCCAACACCTAGCCTAAAGCCCGTAACACTGCAGCAGGTGCTGCCCGCGCTTGCACCGTCCGAAGAAAAG
CGCGGCCTAAAGCGCGAGTCTGGTGACTTGGCACCCACCGTGCAGCTGATGGTACCCAAGCGCCAGCGACTGGAAGA
TGTCTTGGAAAAAATGACCGTGGAACCTGGGCTGGAGCCCGAGGTCCGCGTGCGGCCAATCAAGCAGGTGGCGCCGG
GACTGGGCGTGCAGACCGTGGACGTTCAGATACCCACTACCAGTAGCACCAGTATTGCCACCGCCACAGAGGGCATG
GAGACACAAACGTCCCCGGTTGCCTCAGCGGTGGCGGATGCCGCGGTGCAGGCGGTCGCTGCGGCCGCGTCCAAGAC
CTCTACGGAGGTGCAAACGGACCCGTGGATGTTTCGCGTTTCAGCCCCCCGGCGCCCGCGCGGTTCGAGGAAGTACG
GCGCCGCCAGCGCGCTACTGCCCGAATATGCCCTACATCCTTCCATTGCGCCTACCCCCGGCTATCGTGGCTACACC
TACCGCCCCAGAAGACGAGCAACTACCCGACGCCGAACCACCACTGGAACCCGCCGCCGCCGTCGCCGTCGCCAGCC
CGTGCTGGCCCCGATTTCCGTGCGCAGGGTGGCTCGCGAAGGAGGCAGGACCCTGGTGCTGCCAACAGCGCGCTACC
ACCCCAGCATCGTTTAAAAGCCGGTCTTTGTGGTTCTTGCAGATATGGCCCTCACCTGCCGCCTCCGTTTCCCGGTG
CCGGGATTCCGAGGAAGAATGCACCGTAGGAGGGGCATGGCCGGCCACGGCCTGACGGGCGGCATGCGTCGTGCGCA
CCACCGGCGGCGGCGCGCGTCGCACCGTCGCATGCGCGGCGGTATCCTGCCCCTCCTTATTCCACTGATCGCCGCGG
CGATTGGCGCCGTGCCCGGAATTGCATCCGTGGCCTTGCAGGCGCAGAGACACTGATTAAAAACAAGTTGCATGTGG
AAAAATCAAAATAAAAAGTCTGGACTCTCACGCTCGCTTGGTCCTGTAACTATTTTGTAGAATGGAAGACATCAACT
TTGCGTCTCTGGCCCCGCGACACGGCTCGCGCCCGTTCATGGGAAACTGGCAAGATATCGGCACCAGCAATATGAGC
GGTGGCGCCTTCAGCTGGGGCTCGCTGTGGAGCGGCATTAAAAATTTCGGTTCCACCGTTAAGAACTATGGCAGCAA
GGCCTGGAACAGCAGCACAGGCCAGATGCTGAGGGATAAGTTGAAAGAGCAAAATTTCCAACAAAAGGTGGTAGATG
GCCTGGCCTCTGGCATTAGCGGGGTGGTGGACCTGGCCAACCAGGCAGTGCAAAATAAGATTAACAGTAAGCTTGAT
CCCCGCCCTCCCGTAGAGGAGCCTCCACCGGCCGTGGAGACAGTGTCTCCAGAGGGGCGTGGCGAAAAGCGTCCGCG
CCCCGACAGGGAAGAAACTCTGGTGACGCAAATAGACGAGCCTCCCTCGTACGAGGAGGCACTAAAGCAAGGCCTGC
CCACCACCCGTCCCATCGCGCCCATGGCTACCGGAGTGCTGGGCCAGCACACACCCGTAACGCTGGACCTGCCTCCC
CCCGCCGACACCCAGCAGAAACCTGTGCTGCCAGGCCCGACCGCCGTTGTTGTAACCCGTCCTAGCCGCGCGTCCCT
GCGCCGCGCCGCCAGCGGTCCGCGATCGTTGCGGCCCGTAGCCAGTGGCAACTGGCAAAGCACACTGAACAGCATCG
TGGGTCTGGGGGTGCAATCCCTGAAGCGCCGACGATGCTTCTGAATAGCTAACGTGTCGTATGTGTGTCATGTATGC
GTCCATGTCGCCGCCAGAGGAGCTGCTGAGCCGCCGCGCGCCCGCTTTCCAAGATGGCTACCCCTTCGATGATGCCG
CAGTGGTCTTACATGCACATCTCGGGCCAGGACGCCTCGGAGTACCTGAGCCCCGGGCTGGTGCAGTTTGCCCGCGC
CACCGAGACGTACTTCAGCCTGAATAACAAGTTTAGAAACCCCACGGTGGCGCCTACGCACGACGTGACCACAGACC
GGTCCCAGCGTTTGACGCTGCGGTTCATCCCTGTGGACCGTGAGGATACTGCGTACTCGTACAAGGCGCGGTTCACC
CTAGCTGTGGGTGATAACCGTGTGCTGGACATGGCTTCCACGTACTTTGACATCCGCGGCGTGCTGGACAGGGGCCC
TACTTTTAAGCCCTACTCTGGCACTGCCTACAACGCCCTGGCTCCCAAGGGTGCCCCAAATCCTTGCGAATGGGATG
AAGCTGCTACTGCTCTTGAAATAAACCTAGAAGAAGAGGACGATGACAACGAAGACGAAGTAGACGAGCAAGCTGAG
CAGCAAAAAACTCACGTATTTGGGCAGGCGCCTTATTCTGGTATAAATATTACAAAGGAGGGTATTCAAATAGGTGT
CGAAGGTCAAACACCTAAATATGCCGATAAAACATTTCAACCTGAACCTCAAATAGGAGAATCTCAGTGGTACGAAA
CTGAAATTAATCATGCAGCTGGGAGAGTCCTTAAAAAGACTACCCCAATGAAACCATGTTACGGTTCATATGCAAAA
CCCACAAATGAAAATGGAGGGCAAGGCATTCTTGTAAAGCAACAAAATGGAAAGCTAGAAAGTCAAGTGGAAATGCA
ATTTTTCTCAACTACTGAGGCGACCGCAGGCAATGGTGATAACTTGACTCCTAAAGTGGTATTGTACAGTGAAGATG
TAGATATAGAAACCCCAGACACTCATATTTCTTACATGCCCACTATTAAGGAAGGTAACTCACGAGAACTAATGGGC
CAACAATCTATGCCCAACAGGCCTAATTACATTGCTTTTAGGGACAATTTTATTGGTCTAATGTATTACAACAGCAC
GGGTAATATGGGTGTTCTGGCGGGCCAAGCATCGCAGTTGAATGCTGTTGTAGATTTGCAAGACAGAAACACAGAGC
TTTCATACCAGCTTTTGCTTGATTCCATTGGTGATAGAACCAGGTACTTTTCTATGTGGAATCAGGCTGTTGACAGC
TATGATCCAGATGTTAGAATTATTGAAAATCATGGAACTGAAGATGAACTTCCAAATTACTGCTTTCCACTGGGAGG
TGTGATTAATACAGAGACTCTTACCAAGGTAAAACCTAAAACAGGTCAGGAAAATGGATGGGAAAAAGATGCTACAG
AATTTTCAGATAAAAATGAAATAAGAGTTGGAAATAATTTTGCCATGGAAATCAATCTAAATGCCAACCTGTGGAGA
AATTTCCTGTACTCCAACATAGCGCTGTATTTGCCCGACAAGCTAAAGTACAGTCCTTCCAACGTAAAAATTTCTGA
TAACCCAAACACCTACGACTACATGAACAAGCGAGTGGTGGCTCCCGGGTTAGTGGACTGCTACATTAACCTTGGAG
CACGCTGGTCCCTTGACTATATGGACAACGTCAACCCATTTAACCACCACCGCAATGCTGGCCTGCGCTACCGCTCA
ATGTTGCTGGGCAATGGTCGCTATGTGCCCTTCCACATCCAGGTGCCTCAGAAGTTCTTTGCCATTAAAAACCTCCT
TCTCCTGCCGGGCTCATACACCTACGAGTGGAACTTCAGGAAGGATGTTAACATGGTTCTGCAGAGCTCCCTAGGAA
ATGACCTAAGGGTTGACGGAGCCAGCATTAAGTTTGATAGCATTTGCCTTTACGCCACCTTCTTCCCCATGGCCCAC
AACACCGCCTCCACGCTTGAGGCCATGCTTAGAAACGACACCAACGACCAGTCCTTTAACGACTATCTCTCCGCCGC
CAACATGCTCTACCCTATACCCGCCAACGCTACCAACGTGCCCATATCCATCCCCTCCCGCAACTGGGCGGCTTTCC
GCGGCTGGGCCTTCACGCGCCTTAAGACTAAGGAAACCCCATCACTGGGCTCGGGCTACGACCCTTATTACACCTAC
TCTGGCTCTATACCCTACCTAGATGGAACCTTTTACCTCAACCACACCTTTAAGAAGGTGGCCATTACCTTTGACTC
TTCTGTCAGCTGGCCTGGCAATGACCGCCTGCTTACCCCCAACGAGTTTGAAATTAAGCGCTCAGTTGACGGGGAGG
GTTACAACGTTGCCCAGTGTAACATGACCAAAGACTGGTTCCTGGTACAAATGCTAGCTAACTACAACATTGGCTAC
CAGGGCTTCTATATCCCAGAGAGCTACAAGGACCGCATGTACTCCTTCTTTAGAAACTTCCAGCCCATGAGCCGTCA
GGTGGTGGATGATACTAAATACAAGGACTACCAACAGGTGGGCATCCTACACCAACACAACAACTCTGGATTTGTTG
GCTACCTTGCCCCCACCATGCGCGAAGGACAGGCCTACCCTGCTAACTTCCCCTATCCGCTTATAGGCAAGACCGCA
GTTGACAGCATTACCCAGAAAAAGTTTCTTTGCGATCGCACCCTTTGGCGCATCCCATTCTCCAGTAACTTTATGTC
CATGGGCGCACTCACAGACCTGGGCCAAAACCTTCTCTACGCCAACTCCGCCCACGCGCTAGACATGACTTTTGAGG
TGGATCCCATGGACGAGCCCACCCTTCTTTATGTTTTGTTTGAAGTCTTTGACGTGGTCCGTGTGCACCGGCCGCAC
CGCGGCGTCATCGAAACCGTGTACCTGCGCACGCCCTTCTCGGCCGGCAACGCCACAACATAAAGAAGCAAGCAACA
TCAACAACAGCTGCCGCCATGGGCTCCAGTGAGCAGGAACTGAAAGCCATTGTCAAAGATCTTGGTTGTGGGCCATA
TTTTTTGGGCACCTATGACAAGCGCTTTCCAGGCTTTGTTTCTCCACACAAGCTCGCCTGCGCCATAGTCAATACGG
CCGGTCGCGAGACTGGGGGCGTACACTGGATGGCCTTTGCCTGGAACCCGCACTCAAAAACATGCTACCTCTTTGAG
CCCTTTGGCTTTTCTGACCAGCGACTCAAGCAGGTTTACCAGTTTGAGTACGAGTCACTCCTGCGCCGTAGCGCCAT
TGCTTCTTCCCCCGACCGCTGTATAACGCTGGAAAAGTCCACCCAAAGCGTACAGGGGCCCAACTCGGCCGCCTGTG
GACTATTCTGCTGCATGTTTCTCCACGCCTTTGCCAACTGGCCCCAAACTCCCATGGATCACAACCCCACCATGAAC
CTTATTACCGGGGTACCCAACTCCATGCTCAACAGTCCCCAGGTACAGCCCACCCTGCGTCGCAACCAGGAACAGCT
CTACAGCTTCCTGGAGCGCCACTCGCCCTACTTCCGCAGCCACAGTGCGCAGATTAGGAGCGCCACTTCTTTTTGTC
ACTTGAAAAACATGTAAAAATAATGTACTAGAGACACTTTCAATAAAGGCAAATGCTTTTATTTGTACACTCTCGGG
TGATTATTTACCCCCACCCTTGCCGTCTGCGCCGTTTAAAAATCAAAGGGGTTCTGCCGCGCATCGCTATGCGCCAC
TGGCAGGGACACGTTGCGATACTGGTGTTTAGTGCTCCACTTAAACTCAGGCACAACCATCCGCGGCAGCTCGGTGA
AGTTTTCACTCCACAGGCTGCGCACCATCACCAACGCGTTTAGCAGGTCGGGCGCCGATATCTTGAAGTCGCAGTTG
GGGCCTCCGCCCTGCGCGCGCGAGTTGCGATACACAGGGTTGCAGCACTGGAACACTATCAGCGCCGGGTGGTGCAC
GCTGGCCAGCACGCTCTTGTCGGAGATCAGATCCGCGTCCAGGTCCTCCGCGTTGCTCAGGGCGAACGGAGTCAACT
TTGGTAGCTGCCTTCCCAAAAAGGGCGCGTGCCCAGGCTTTGAGTTGCACTCGCACCGTAGTGGCATCAAAAGGTGA
CCGTGCCCGGTCTGGGCGTTAGGATACAGCGCCTGCATAAAAGCCTTGATCTGCTTAAAAGCCACCTGAGCCTTTGC
GCCTTCAGAGAAGAACATGCCGCAAGACTTGCCGGAAAACTGATTGGCCGGACAGGCCGCGTCGTGCACGCAGCACC
TTGCGTCGGTGTTGGAGATCTGCACCACATTTCGGCCCCACCGGTTCTTCACGATCTTGGCCTTGCTAGACTGCTCC
TTCAGCGCGCGCTGCCCGTTTTCGCTCGTCACATCCATTTCAATCACGTGCTCCTTATTTATCATAATGCTTCCGTG
TAGACACTTAAGCTCGCCTTCGATCTCAGCGCAGCGGTGCAGCCACAACGCGCAGCCCGTGGGCTCGTGATGCTTGT
AGGTCACCTCTGCAAACGACTGCAGGTACGCCTGCAGGAATCGCCCCATCATCGTCACAAAGGTCTTGTTGCTGGTG
AAGGTCAGCTGCAACCCGCGGTGCTCCTCGTTCAGCCAGGTCTTGCATACGGCCGCCAGAGCTTCCACTTGGTCAGG
CAGTAGTTTGAAGTTCGCCTTTAGATCGTTATCCACGTGGTACTTGTCCATCAGCGCGCGCGCAGCCTCCATGCCCT
TCTCCCACGCAGACACGATCGGCACACTCAGCGGGTTCATCACCGTAATTTCACTTTCCGCTTCGCTGGGCTCTTCC
TCTTCCTCTTGCGTCCGCATACCACGCGCCACTGGGTCGTCTTCATTCAGCCGCCGCACTGTGCGCTTACCTCCTTT
GCCATGCTTGATTAGCACCGGTGGGTTGCTGAAACCCACCATTTGTAGCGCCACATCTTCTCTTTCTTCCTCGCTGT
CCACGATTACCTCTGGTGATGGCGGGCGCTCGGGCTTGGGAGAAGGGCGCTTCTTTTTCTTCTTGGGCGCAATGGCC
AAATCCGCCGCCGAGGTCGATGGCCGCGGGCTGGGTGTGCGCGGCACCAGCGCGTCTTGTGATGAGTCTTCCTCGTC
CTCGGACTCGATACGCCGCCTCATCCGCTTTTTTGGGGGCGCCCGGGGAGGCGGCGGCGACGGGGACGGGGACGACA
CGTCCTCCATGGTTGGGGGACGTCGCGCCGCACCGCGTCCGCGCTCGGGGGTGGTTTCGCGCTGCTCCTCTTCCCGA
CTGGCCATTTCCTTCTCCTATAGGCAGAAAAAGATCATGGAGTCAGTCGAGAAGAAGGACAGCCTAACCGCCCCCTC
TGAGTTCGCCACCACCGCCTCCACCGATGCCGCCAACGCGCCTACCACCTTCCCCGTCGAGGCACCCCCGCTTGAGG
AGGAGGAAGTGATTATCGAGCAGGACCCAGGTTTTGTAAGCGAAGACGACGAGGACCGCTCAGTACCAACAGAGGAT
AAAAAGCAAGACCAGGACAACGCAGAGGCAAACGAGGAACAAGTCGGGCGGGGGGACGAAAGGCATGGCGACTACCT
AGATGTGGGAGACGACGTGCTGTTGAAGCATCTGCAGCGCCAGTGCGCCATTATCTGCGACGCGTTGCAAGAGCGCA
GCGATGTGCCCCTCGCCATAGCGGATGTCAGCCTTGCCTACGAACGCCACCTATTCTCACCGCGCGTACCCCCCAAA
CGCCAAGAAAACGGCACATGCGAGCCCAACCCGCGCCTCAACTTCTACCCCGTATTTGCCGTGCCAGAGGTGCTTGC
CACCTATCACATCTTTTTCCAAAACTGCAAGATACCCCTATCCTGCCGTGCCAACCGCAGCCGAGCGGACAAGCAGC
TGGCCTTGCGGCAGGGCGCTGTCATACCTGATATCGCCTCGCTCAACGAAGTGCCAAAAATCTTTGAGGGTCTTGGA
CGCGACGAGAAGCGCGCGGCAAACGCTCTGCAACAGGAAAACAGCGAAAATGAAAGTCACTCTGGAGTGTTGGTGGA
ACTCGAGGGTGACAACGCGCGCCTAGCCGTACTAAAACGCAGCATCGAGGTCACCCACTTTGCCTACCCGGCACTTA
ACCTACCCCCCAAGGTCATGAGCACAGTCATGAGTGAGCTGATCGTGCGCCGTGCGCAGCCCCTGGAGAGGGATGCA
AATTTGCAAGAACAAACAGAGGAGGGCCTACCCGCAGTTGGCGACGAGCAGCTAGCGCGCTGGCTTCAAACGCGCGA
GCCTGCCGACTTGGAGGAGCGACGCAAACTAATGATGGCCGCAGTGCTCGTTACCGTGGAGCTTGAGTGCATGCAGC
GGTTCTTTGCTGACCCGGAGATGCAGCGCAAGCTAGAGGAAACATTGCACTACACCTTTCGACAGGGCTACGTACGC
CAGGCCTGCAAGATCTCCAACGTGGAGCTCTGCAACCTGGTCTCCTACCTTGGAATTTTGCACGAAAACCGCCTTGG
GCAAAACGTGCTTCATTCCACGCTCAAGGGCGAGGCGCGCCGCGACTACGTCCGCGACTGCGTTTACTTATTTCTAT
GCTACACCTGGCAGACGGCCATGGGCGTTTGGCAGCAGTGCTTGGAGGAGTGCAACCTCAAGGAGCTGCAGAAACTG
CTAAAGCAAAACTTGAAGGACCTATGGACGGCCTTCAACGAGCGCTCCGTGGCCGCGCACCTGGCGGACATCATTTT
CCCCGAACGCCTGCTTAAAACCCTGCAACAGGGTCTGCCAGACTTCACCAGTCAAAGCATGTTGCAGAACTTTAGGA
ACTTTATCCTAGAGCGCTCAGGAATCTTGCCCGCCACCTGCTGTGCACTTCCTAGCGACTTTGTGCCCATTAAGTAC
CGCGAATGCCCTCCGCCGCTTTGGGGCCACTGCTACCTTCTGCAGCTAGCCAACTACCTTGCCTACCACTCTGACAT
AATGGAAGACGTGAGCGGTGACGGTCTACTGGAGTGTCACTGTCGCTGCAACCTATGCACCCCGCACCGCTCCCTGG
TTTGCAATTCGCAGCTGCTTAACGAAAGTCAAATTATCGGTACCTTTGAGCTGCAGGGTCCCTCGCCTGACGAAAAG
TCCGCGGCTCCGGGGTTGAAACTCACTCCGGGGCTGTGGACGTCGGCTTACCTTCGCAAATTTGTACCTGAGGACTA
CCACGCCCACGAGATTAGGTTCTACGAAGACCAATCCCGCCCGCCAAATGCGGAGCTTACCGCCTGCGTCATTACCC
AGGGCCACATTCTTGGCCAATTGCAAGCCATCAACAAAGCCCGCCAAGAGTTTCTGCTACGAAAGGGACGGGGGGTT
TACTTGGACCCCCAGTCCGGCGAGGAGCTCAACCCAATCCCCCCGCCGCCGCAGCCCTATCAGCAGCAGCCGCGGGC
CCTTGCTTCCCAGGATGGCACCCAAAAAGAAGCTGCAGCTGCCGCCGCCACCCACGGACGAGGAGGAATACTGGGAC
AGTCAGGCAGAGGAGGTTTTGGACGAGGAGGAGGAGGACATGATGGAAGACTGGGAGAGCCTAGACGAGGAAGCTTC
CGAGGTCGAAGAGGTGTCAGACGAAACACCGTCACCCTCGGTCGCATTCCCCTCGCCGGCGCCCCAGAAATCGGCAA
CCGGTTCCAGCATGGCTACAACCTCCGCTCCTCAGGCGCCGCCGGCACTGCCCGTTCGCCGACCCAACCGTAGATGG
GACACCACTGGAACCAGGGCCGGTAAGTCCAAGCAGCCGCCGCCGTTAGCCCAAGAGCAACAACAGCGCCAAGGCTA
CCGCTCATGGCGCGGGCACAAGAACGCCATAGTTGCTTGCTTGCAAGACTGTGGGGGCAACATCTCCTTCGCCCGCC
GCTTTCTTCTCTACCATCACGGCGTGGCCTTCCCCCGTAACATCCTGCATTACTACCGTCATCTCTACAGCCCATAC
TGCACCGGCGGCAGCGGCAGCGGCAGCAACAGCAGCGGCCACACAGAAGCAAAGGCGACCGGATAGCAAGACTCTGA
CAAAGCCCAAGAAATCCACAGCGGCGGCAGCAGCAGGAGGAGGAGCGCTGCGTCTGGCGCCCAACGAACCCGTATCG
ACCCGCGAGCTTAGAAACAGGATTTTTCCCACTCTGTATGCTATATTTCAACAGAGCAGGGGCCAAGAACAAGAGCT
GAAAATAAAAAACAGGTCTCTGCGATCCCTCACCCGCAGCTGCCTGTATCACAAAAGCGAAGATCAGCTTCGGCGCA
CGCTGGAAGACGCGGAGGCTCTCTTCAGTAAATACTGCGCGCTGACTCTTAAGGACTAGTTTCGCGCCCTTTCTCAA
ATTTAAGCGCGAAAACTACGTCATCTCCAGCGGCCACACCCGGCGCCAGCACCTGTCGTCAGCGCCATTATGAGCAA
GGAAATTCCCACGCCCTACATGTGGAGTTACCAGCCACAAATGGGACTTGCGGCTGGAGCTGCCCAAGACTACTCAA
CCCGAATAAACTACATGAGCGCGGGACCCCACATGATATCCCGGGTCAACGGAATCCGCGCCCACCGAAACCGAATT
CTCTTGGAACAGGCGGCTATTACCACCACACCTCGTAATAACCTTAATCCCCGTAGTTGGCCCGCTGCCCTGGTGTA
CCAGGAAAGTCCCGCTCCCACCACTGTGGTACTTCCCAGAGACGCCCAGGCCGAAGTTCAGATGACTAACTCAGGGG
CGCAGCTTGCGGGCGGCTTTCGTCACAGGGTGCGGTCGCCCGGGCAGGGTATAACTCACCTGACAATCAGAGGGCGA
GGTATTCAGCTCAACGACGAGTCGGTGAGCTCCTCGCTTGGTCTCCGTCCGGACGGGACATTTCAGATCGGCGGCGC
CGGCCGTCCTTCATTCACGCCTCGTCAGGCAATCCTAACTCTGCAGACCTCGTCCTCTGAGCCGCGCTCTGGAGGCA
TTGGAACTCTGCAATTTATTGAGGAGTTTGTGCCATCGGTCTACTTTAACCCCTTCTCGGGACCTCCCGGCCACTAT
CCGGATCAATTTATTCCTAACTTTGACGCGGTAAAGGACTCGGCGGACGGCTACGACTGAATGTTAAGTGGAGAGGC
AGAGCAACTGCGCCTGAAACACCTGGTCCACTGTCGCCGCCACAAGTGCTTTGCCCGCGACTCCGGTGAGTTTTGCT
ACTTTGAATTGCCCGAGGATCATATCGAGGGCCCGGCGCACGGCGTCCGGCTTACCGCCCAGGGAGAGCTTGCCCGT
AGCCTGATTCGGGAGTTTACCCAGCGCCCCCTGCTAGTTGAGCGGGACAGGGGACCCTGTGTTCTCACTGTGATTTG
CAACTGTCCTAACCTTGGATTACATCAAGATCTTTGTTGCCATCTCTGTGCTGAGTATAATAAATACAGAAATTAAA
ATATACTGGGGCTCCTATCGCCATCCTGTAAACGCCACCGTCTTCACCCGCCCAAGCAAACCAAGGCGAACCTTACC
TGGTACTTTTAACATCTCTCCCTCTGTGATTTACAACAGTTTCAACCCAGACGGAGTGAGTCTACGAGAGAACCTCT
CCGAGCTCAGCTACTCCATCAGAAAAAACACCACCCTCCTTACCTGCCGGGAACGTACGAGTGCGTCACCGGCCGCT
GCACCACACCTACCGCCTGACCGTAAACCAGACTTTTTCCGGACAGACCTCAATAACTCTGTTTACCAGAACAGGAG
GTGAGCTTAGAAAACCCTTAGGGTATTAGGCCAAAGGCGCAGCTACTGTGGGGTTTATGAACAATTCAAGCAACTCT
ACGGGCTATTCTAATTCAGGTTTCTCTAGAATCGGGGTTGGGGTTATTCTCTGTCTTGTGATTCTCTTTATTCTTAT
ACTAACGCTTCTCTGCCTAAGGCTCGCCGCCTGCTGTGTGCACATTTGCATTTATTGTCAGCTTTTTAAACGCTGGG
GTCGCCACCCAAGATGATTAGGTACATAATCCTAGGTTTACTCACCCTTGCGTCAGCCCACGGTACCACCCAAAAGG
TGGATTTTAAGGAGCCAGCCTGTAATGTTACATTCGCAGCTGAAGCTAATGAGTGCACCACTCTTATAAAATGCACC
ACAGAACATGAAAAGCTGCTTATTCGCCACAAAAACAAAATTGGCAAGTATGCTGTTTATGCTATTTGGCAGCCAGG
TGACACTACAGAGTATAATGTTACAGTTTTCCAGGGTAAAAGTCATAAAACTTTTATGTATACTTTTCCATTTTATG
AAATGTGCGACATTACCATGTACATGAGCAAACAGTATAAGTIGTGGCCCCCACAAAATTGTGTGGAAAACACTGGC
ACTTTCTGCTGCACTGCTATGCTAATTACAGTGCTCGCTTTGGTCTGTACCCTACTCTATATTAAATACAAAAGCAG
ACGCAGCTTTATTGAGGAAAAGAAAATGCCTTAATTTACTAAGTTACAAAGCTAATGTCACCACTAACTGCTTTACT
CGCTGCTTGCAAAACAAATTCAAAAAGTTAGCATTATAATTAGAATAGGATTTAAACCCCCCGGTCATTTCCTGCTC
AATACCATTCCCCTGAACAATTGACTCTATGTGGGATATGCTCCAGCGCTACAACCTTGAAGTCAGGCTTCCTGGAT
GTCAGCATCTGACTTTGGCCAGCACCTGTCCCGCGGATTTGTTCCAGTCCAACTACAGCGACCCACCCTAACAGAGA
TGACCAACACAACCAACGCGGCCGCCGCTACCGGACTTACATCTACCACAAATACACCCCAAGTTTCTGCCTTTGTC
AATAACTGGGATAACTTGGGCATGTGGTGGTTCTCCATAGCGCTTATGTTTGTATGCCTTATTATTATGTGGCTCAT
CTGCTGCCTAAAGCGCAAACGCGCCCGACCACCCATCTATAGTCCCATCATTGTGCTACACCCAAACAATGATGGAA
TCCATAGATTGGACGGACTGAAACACATGTTCTTTTCTCTTACAGTATGATTAAATGAGACATGATTCCTCGAGTTT
TTATATTACTGACCCTTGTTGCGCTTTTTTGTGCGTGCTCCACATTGGCTGCGGTTTCTCACATCGAAGTAGACTGC
ATTCCAGCCTTCACAGTCTATTTGCTTTACGGATTTGTCACCCTCACGCTCATCTGCAGCCTCATCACTGTGGTCAT
CGCCTTTATCCAGTGCATTGACTGGGTCTGTGTGCGCTTTGCATATCTCAGACACCATCCCCAGTACAGGGACAGGA
CTATAGCTGAGCTTCTTAGAATTCTTTAATTATGAAATTTACTGTGACTTTTCTGCTGATTATTTGCACCCTATCTG
CGTTTTGTTCCCCGACCTCCAAGCCTCAAAGACATATATCATGCAGATTCACTCGTATATGGAATATTCCAAGTTGC
TACAATGAAAAAAGCGATCTTTCCGAAGCCTGGTTATATGCAATCATCTCTGTTATGGTGTTCTGCAGTACCATCTT
AGCCCTAGCTATATATCCCTACCTTGACATTGGCTGGAAACGAATAGATGCCATGAACCACCCAACTTTCCCCGCGC
CCGCTATGCTTCCACTGCAACAAGTTGTTGCCGGCGGCTTTGTCCCAGCCAATCAGCCTCGCCCCACTTCTCCCACC
CCCACTGAAATCAGCTACTTTAATCTAACAGGAGGAGATGACTGACACCCTAGATCTAGAAATGGACGGAATTATTA
CAGAGCAGCGCCTGCTAGAAAGACGCAGGGCAGCGGCCGAGCAACAGCGCATGAATCAAGAGCTCCAAGACATGGTT
AACTTGCACCAGTGCAAAAGGGGTATCTTTTGTCTGGTAAAGCAGGCCAAAGTCACCTACGACAGTAATACCACCGG
ACACCGCCTTAGCTACAAGTTGCCAACCAAGCGTCAGAAATTGGTGGTCATGGTGGGAGAAAAGCCCATTACCATAA
CTCAGCACTCGGTAGAAACCGAAGGCTGCATTCACTCACCTTGTCAAGGACCTGAGGATCTCTGCACCCTTATTAAG
ACCCTGTGCGGTCTCAAAGATCTTATTCCCTTTAACTAATAAAAAAAAATAATAAAGCATCACTTACTTAAAATCAG
TTAGCAAATTTCTGTCCAGTTTATTCAGCAGCACCTCCTTGCCCTCCTCCCAGCTCTGGTATTGCAGCTTCCTCCTG
GCTGCAAACTTTCTCCACAATCTAAATGGAATGTCAGTTTCCTCCTGTTCCTGTCCATCCGCACCCACTATCTTCAT
GTTGTTGCAGATGAAGCGCGCAAGACCGTCTGAAGATACCTTCAACCCCGTGTATCCATATGACACGGAAACCGGTC
CTCCAACTGTGCCTTTTCTTACTCCTCCCTTTGTATCCCCCAATGGGTTTCAAGAGAGTCCCCCTGGGGTACTCTCT
TTGCGCCTATCCGAACCTCTAGTTACCTCCAATGGCATGCTTGCGCTCAAAATGGGCAACGGCCTCTCTCTGGACGA
GGCCGGCAACCTTACCTCCCAAAATGTAACCACTGTGAGCCCACCTCTCAAAAAAACCAAGTCAAACATAAACCTGG
AAATATCTGCACCCCTCACAGTTACCTCAGAAGCCCTAACTGTGGCTGCCGCCGCACCTCTAATGGTCGCGGGCAAC
ACACTCACCATGCAATCACAGGCCCCGCTAACCGTGCACGACTCCAAACTTAGCATTGCCACCCAAGGACCCCTCAC
AGTGTCAGAAGGAAAGCTAGCCCTGCAAACATCAGGCCCCCTCACCACCACCGATAGCAGTACCCTTACTATCACTG
CCTCACCCCCTCTAACTACTGCCACTGGTAGCTTGGGCATTGACTTGAAAGAGCCCATTTATACACAAAATGGAAAA
CTAGGACTAAAGTACGGGGCTCCTTTGCATGTAACAGACGACCTAAACACTTTGACCGTAGCAACTGGTCCAGGTGT
GACTATTAATAATACTTCCTTGCAAACTAAAGTTACTGGAGCCTTGGGTTTTGATTCACAAGGCAATATGCAACTTA
ATGTAGCAGGAGGACTAAGGATTGATTCTCAAAACAGACGCCTTATACTTGATGTTAGTTATCCGTTTGATGCTCAA
AACCAACTAAATCTAAGACTAGGACAGGGCCCTCTTTTTATAAACTCAGCCCACAACTTGGATATTAACTACAACAA
AGGCCTTTACTTGTTTACAGCTTCAAACAATTCCAAAAAGCTTGAGGTTAACCTAAGCACTGCCAAGGGGTTGATGT
TTGACGCTACAGCCATAGCCATTAATGCAGGAGATGGGCTTGAATTTGGTTCACCTAATGCACCAAACACAAATCCC
CTCAAAACAAAAATTGGCCATGGCCTAGAATTTGATTCAAACAAGGCTATGGTTCCTAAACTAGGAACTGGCCTTAG
TTTTGACAGCACAGGTGCCATTACAGTAGGAAACAAAAATAATGATAAGCTAACTTTGTGGACCACACCAGCTCCAT
CTCCTAACTGTAGACTAAATGCAGAGAAAGATGCTAAACTCACTTTGGTCTTAACAAAATGTGGCAGTCAAATACTT
GCTACAGTTTCAGTTTTGGCTGTTAAAGGCAGTTTGGCTCCAATATCTGGAACAGTTCAAAGTGCTCATCTTATTAT
AAGATTTGACGAAAATGGAGTGCTACTAAACAATTCCTTCCTGGACCCAGAATATTGGAACTTTAGAAATGGAGATC
TTACTGAAGGCACAGCCTATACAAACGCTGTTGGATTTATGCCTAACCTATCAGCTTATCCAAAATCTCACGGTAAA
ACTGCCAAAAGTAACATTGTCAGTCAAGTTTACTTAAACGGAGACAAAACTAAACCTGTAACACTAACCATTACACT
AAACGGTACACAGGAAACAGGAGACACAACTCCAAGTGCATACTCTATGTCATTTTCATGGGACTGGTCTGGCCACA
ACTACATTAATGAAATATTTGCCACATCCTCTTACACTTTTTCATACATTGCCCAAGAATAAAGAATCGTTTGTGTT
ATGTTTCAACGTGTTTATTTTTCAATTGCAGAAAATTTCAAGTCATTTTTCATTCAGTAGTATAGCCCCACCACCAC
ATAGCTTATACAGATCACCGTACCTTAATCAAACTCACAGAACCCTAGTATTCAACCTGCCACCTCCCTCCCAACAC
ACAGAGTACACAGTCCTTTCTCCCCGGCTGGCCTTAAAAAGCATCATATCATGGGTAACAGACATATTCTTAGGTGT
TATATTCCACACGGTTTCCTGTCGAGCCAAACGCTCATCAGTGATATTAATAAACTCCCCGGGCAGCTCACTTAAGT
TCATGTCGCTGTCCAGCTGCTGAGCCACAGGCTGCTGTCCAACTTGCGGTTGCTTAACGGGCGGCGAAGGAGAAGTC
CACGCCTACATGGGGGTAGAGTCATAATCGTGCATCAGGATAGGGCGGTGGTGCTGCAGCAGCGCGCGAATAAACTG
CTGCCGCCGCCGCTCCGTCCTGCAGGAATACAACATGGCAGTGGTCTCCTCAGCGATGATTCGCACCGCCCGCAGCA
TAAGGCGCCTTGTCCTCCGGGCACAGCAGCGCACCCTGATCTCACTTAAATCAGCACAGTAACTGCAGCACAGCACC
ACAATATTGTTCAAAATCCCACAGTGCAAGGCGCTGTATCCAAAGCTCATGGCGGGGACCACAGAACCCACGTGGCC
ATCATACCACAAGCGCAGGTAGATTAAGTGGCGACCCCTCATAAACACGCTGGACATAAACATTACCTCTTTTGGCA
TGTTGTAATTCACCACCTCCCGGTACCATATAAACCTCTGATTAAACATGGCGCCATCCACCACCATCCTAAACCAG
CTGGCCAAAACCTGCCCGCCGGCTATACACTGCAGGGAACCGGGACTGGAACAATGACAGTGGAGAGCCCAGGACTC
GTAACCATGGATCATCATGCTCGTCATGATATCAATGTTGGCACAACACAGGCACACGTGCATACACTTCCTCAGGA
TTACAAGCTCCTCCCGCGTTAGAACCATATCCCAGGGAACAACCCATTCCTGAATCAGCGTAAATCCCACACTGCAG
GGAAGACCTCGCACGTAACTCACGTTGTGCATTGTCAAAGTGTTACATTCGGGCAGCAGCGGATGATCCTCCAGTAT
GGTAGCGCGGGTTTCTGTCTCAAAAGGAGGTAGACGATCCCTACTGTACGGAGTGCGCCGAGACAACCGAGATCGTG
TTGGTCGTAGTGTCATGCCAAATGGAACGCCGGACGTAGTCATATTTCCTGAAGCAAAACCAGGTGCGGGCGTGACA
AACAGATCTGCGTCTCCGGTCTCGCCGCTTAGATCGCTCTGTGTAGTAGTTGTAGTATATCCACTCTCTCAAAGCAT
CCAGGCGCCCCCTGGCTTCGGGTTCTATGTAAACTCCTTCATGCGCCGCTGCCCTGATAACATCCACCACCGCAGAA
TAAGCCACACCCAGCCAACCTACACATTCGTTCTGCGAGTCACACACGGGAGGAGCGGGAAGAGCTGGAAGAACCAT
GTTTTTTTTTTTATTCCAAAAGATTATCCAAAACCTCAAAATGAAGATCTATTAAGTGAACGCGCTCCCCTCCGGTG
GCGTGGTCAAACTCTACAGCCAAAGAACAGATAATGGCATTTGTAAGATGTTGCACAATGGCTTCCAAAAGGCAAAC
GGCCCTCACGTCCAAGTGGACGTAAAGGCTAAACCCTTCAGGGTGAATCTCCTCTATAAACATTCCAGCACCTTCAA
CCATGCCCAAATAATTCTCATCTCGCCACCTTCTCAATATATCTCTAAGCAAATCCCGAATATTAAGTCCGGCCATT
GTAAAAATCTGCTCCAGAGCGCCCTCCACCTTCAGCCTCAAGCAGCGAATCATGATTGCAAAAATTCAGGTTCCTCA
CAGACCTGTATAAGATTCAAAAGCGGAACATTAACAAAAATACCGCGATCCCGTAGGTCCCTTCGCAGGGCCAGCTG
AACATAATCGTGCAGGTCTGCACGGACCAGCGCGGCCACTTCCCCGCCAGGAACCATGACAAAAGAACCCACACTGA
TTATGACACGCATACTCGGAGCTATGCTAACCAGCGTAGCCCCGATGTAAGCTTGTTGCATGGGCGGCGATATAAAA
TGCAAGGTGCTGCTCAAAAAATCAGGCAAAGCCTCGCGCAAAAAAGAAAGCACATCGTAGTCATGCTCATGCAGATA
AAGGCAGGTAAGCTCCGGAACCACCACAGAAAAAGACACCATTTTTCTCTCAAACATGTCTGCGGGTTTCTGCATAA
ACACAAAATAAAATAACAAAAAAACATTTAAACATTAGAAGCCTGTCTTACAACAGGAAAAACAACCCTTATAAGCA
TAAGACGGACTACGGCCATGCCGGCGTGACCGTAAAAAAACTGGTCACCGTGATTAAAAAGCACCACCGACAGCTCC
TCGGTCATGTCCGGAGTCATAATGTAAGACTCGGTAAACACATCAGGTTGATTCACATCGGTCAGTGCTAAAAAGCG
ACCGAAATAGCCCGGGGGAATACATACCCGCAGGCGTAGAGACAACATTACAGCCCCCATAGGAGGTATAACAAAAT
TAATAGGAGAGAAAAACACATAAACACCTGAAAAACCCTCCTGCCTAGGCAAAATAGCACCCTCCCGCTCCAGAACA
ACATACAGCGCTTCCACAGCGGCAGCCATAACAGTCAGCCTTACCAGTAAAAAAGAAAACCTATTAAAAAAACACCA
CTCGACACGGCACCAGCTCAATCAGTCACAGTGTAAAAAAGGGCCAAGTGCAGAGCGAGTATATATAGGACTAAAAA
ATGACGTAACGGTTAAAGTCCACAAAAAACACCCAGAAAACCGCACGCGAACCTACGCCCAGAAACGAAAGCCAAAA
AACCCACAACTTCCTCAAATCGTCACTTCCGTTTTCCCACGTTACGTAACTTCCCATTTTAAGAAAACTACAATTCC
CAACACATACAAGTTACTCCGCCCTAAAACCTACGTCACCCGCCCCGTTCCCACGCCCCGCGCCACGTCACAAACTC
CACCCCCTCATTATCATATTGGCTTCAATCCAAAATAAGGTATATTATTGATGATG

GenBank Accession No. AP_000226 (SEQ ID NO: 241)

MKRARPSEDTFNPVYPYDTETGPPTVPFLTPPFVSPNGFQESPPGVLSLRLSEPLVTSNGMLALKMGNGLSLDEAGN
LTSQNVTTVSPPLKKTKSNINLEISAPLTVTSEALTVAAAAPLMVAGNTLTMQSQAPLTVHDSKLSIATQGPLTVSE
GKLALQTSGPLTTTDSSTLTITASPPLTTATGSLGIDLKEPIYTQNGKLGLKYGAPLHVTDDLNTLTVATGPGVTIN
NTSLQTKVTGALGFDSQGNMQLNVAGGLRIDSQNRRLILDVSYPFDAQNQLNLRLGQGPLFINSAHNLDINYNKGLY
LFTASNNSKKLEVNLSTAKGLMFDATAIAINAGDGLEFGSPNAPNINPLKTKIGHGLEFDSNKAMVPKLGTGLSFDS
TGAITVGNKNNDKLTLWTTPAPSPNCRLNAEKDAKLTLVLTKCGSQILATVSVLAVKGSLAPISGTVQSAHLIIRFD
ENGVLLNNSFLDPEYWNFRNGDLTEGTAYTNAVGFMPNLSAYPKSHGKTAKSNIVSQVYLNGDKTKPVTLTITLNGT
QETGDTTPSAYSMSFSWDWSGHNYINEIFATSSYTFSYIAQE

GenBank Accession No. AP_000206 (SEQ ID NO: 242)

MRRAAMYEEGPPPSYESVVSAAPVAAALGSPFDAPLDPPFVPPRYLRPTGGRNSIRYSELAPLFDTTRVYLVDNKST
DVASLNYQNDHSNFLTTVIQNNDYSPGEASTQTINLDDRSHWGGDLKTILHTNMPNVNEFMFTNKFKARVMVSRLPT
KDNQVELKYEWVEFTLPEGNYSETMTIDLMNNAIVEHYLKVGRQNGVLESDIGVKFDTRNFRLGFDPVTGLVMPGVY
TNEAFHPDIILLPGCGVDFTHSRLSNLLGIRKRQPFQEGFRITYDDLEGGNIPALLDVDAYQASLKDDTEQGGGGAG
GSNSSGSGAEENSNAAAAAMQPVEDMNDHAIRGDTFATRAEEKRAEAEAAAEAAAPAAQPEVEKPQKKPVIKPLTED
SKKRSYNLISNDSTFTQYRSWYLAYNYGDPQTGIRSWTLLCTPDVTCGSEQVYWSLPDMMQDPVTFRSTRQISNFPV
VGAELLPVHSKSFYNDQAVYSQLIRQFTSLTHVFNRFPENQILARPPAPTITTVSENVPALTDHGTLPLRNSIGGVQ
RVTITDARRRTCPYVYKALGIVSPRVLSSRTF

GenBank Accession No. AP_000211 (SEQ ID NO: 243)

MATPSMMPQWSYMHISGQDASEYLSPGLVQFARATETYFSLNNKFRNPTVAPTHDVTTDRSQRLTLRFIPVDREDTA
YSYKARFTLAVGDNRVLDMASTYFDIRGVLDRGPTFKPYSGTAYNALAPKGAPNPCEWDEAATALEINLEEEDDDNE
DEVDEQAEQQKTHVFGQAPYSGINITKEGIQIGVEGQTPKYADKTFQPEPQIGESQWYETEINHAAGRVLKKTTPMK
PCYGSYAKPTNENGGQGILVKQQNGKLESQVEMQFFSTTEATAGNGDNLTPKVVLYSEDVDIETPDTHISYMPTIKE
GNSRELMGQQSMPNRPNYIAFRDNFIGLMYYNSTGNMGVLAGQASQLNAVVDLQDRNTELSYQLLLDSIGDRTRYFS
MWNQAVDSYDPDVRIIENHGTEDELPNYCFPLGGVINTETLTKVKPKTGQENGWEKDATEFSDKNEIRVGNNFAMEI
NLNANLWRNFLYSNIALYLPDKLKYSPSNVKISDNPNTYDYMNKRVVAPGLVDCYINLGARWSLDYMDNVNPFNHHR
NAGLRYRSMLLGNGRYVPFHIQVPQKFFAIKNLLLLPGSYTYEWNFRKDVNMVLQSSLGNDLRVDGASIKFDSICLY
ATFFPMAHNTASTLEAMLRNDTNDQSFNDYLSAANMLYPIPANATNVPISIPSRNWAAFRGWAFTRLKTKETPSLGS
GYDPYYTYSGSIPYLDGTFYLNHTFKKVAITFDSSVSWPGNDRLLTPNEFEIKRSVDGEGYNVAQCNMTKDWFLVQM
LANYNIGYQGFYIPESYKDRMYSFFRNFQPMSRQVVDDTKYKDYQQVGILHQHNNSGFVGYLAPTMREGQAYPANFP
YPLIGKTAVDSITQKKFLCDRTLWRIPFSSNFMSMGALTDLGQNLLYANSAHALDMTFEVDPMDEPTLLYVLFEVFD
VVRVHRPHRGVIETVYLRTPFSAGNATT

GenBank Accession No. AY128640 (SEQ ID NO: 209)

CATCATCAATAATATACCTTATAGATGGAATGGTGCCAATATGTAAATGAGGTGATTTTAAAAAGTGTGGGCCGTGT
GGTGATTGGCTGTGGGGTTAACGGTTAAAAGGGGCGGCGCGGCCGTGGGAAAATGACGTTTTATGGGGGTGGAGTTT
TTTTGCAAGTTGTCGCGGGAAATGTTACGCATAAAAAGGCTTCTTTTCTCACGGAACTACTTAGTTTTCCCACGGTA
TTTAACAGGAAATGAGGTAGTTTTGACCGGATGCAAGTGAAAATTGCTGATTTTCGCGCGAAAACTGAATGAGGAAG
TGTTTTTCTGAATAATGTGGTATTTATGGCAGGGTGGAGTATTTGTTCAGGGCCAGGTAGACTTTGACCCATTACGT
GGAGGTTTCGATTACCGTGTTTTTTACCTGAATTTCCGCGTACCGTGTCAAAGTCTTCTGTTTTTACGTAGGTGTCA
GCTGATCGCTAGGGTATTTATACCTCAGGGTTTGTGTCAAGAGGCCACTCTTGAGTGCCAGCGAGAAGAGTTTTCTC
CTCTGCGCCGGCAGTTTAATAATAAAAAAATGAGAGATTTGCGATTTCTGCCTCAGGAAATAATCTCTGCTGAGACT
GGAAATGAAATATTGGAGCTTGTGGTGCACGCCCTGATGGGAGACGATCCGGAGCCACCTGTGCAGCTTTTTGAGCC
TCCTACGCTTCAGGAACTGTATGATTTAGAGGTAGAGGGATCGGAGGATTCTAATGAGGAAGCTGTGAATGGCTTTT
TTACCGATTCTATGCTTTTAGCTGCTAATGAAGGATTAGAATTAGATCCGCCTTTGGACACTTTCAATACTCCAGGG
GTGATTGTGGAAAGCGGTACAGGTGTAAGAAAATTACCTGATTTGAGTTCCGTGGACTGTGATTTGCACTGCTATGA
AGACGGGTTTCCTCCGAGTGATGAGGAGGACCATGAAAAGGAGCAGTCCATGCAGACTGCAGCGGGTGAGGGAGTGA
AGGCTGCCAATGTTGGTTTTCAGTTGGATTGCCCGGAGCTTCCTGGACATGGCTGTAAGTCTTGTGAATTTCACAGG
AAAAATACTGGAGTAAAGGAACTGTTATGTTCGCTTTGTTATATGAGAACGCACTGCCACTTTATTTACAGTAAGTG
TGTTTAAGTTAAAATTTAAAGGAATATGCTGTTTTTCACATGTATATTGAGTGTGAGTTTTGTGCTTCTTATTATAG
GTCCTGTGTCTGATGCTGATGAATCACCATCTCCTGATTCTACTACCTCACCTCCTGATATTCAAGCACCTGTTCCT
GTGGACGTGCGCAAGCCCATTCCTGTGAAGCTTAAGCCTGGGAAACGTCCAGCAGTGGAGAAACTTGAGGACTTGTT
ACAGGGTGGGGACGGACCTTTGGACTTGAGTACACGGAAACGTCCAAGACAATAAGTGTTCCATATCCGTGTTTACT
TAAGGTGACGTCAATATTTGTGTGAGAGTGCAATGTAATAAAAATATGTTAACTGTTCACTGGTTTTTATTGCTTTT
TGGGCGGGGACTCAGGTATATAAGTAGAAGCAGACCTGTGTGGTTAGCTCATAGGAGCTGGCTTTCATCCATGGAGG
TTTGGGCCATTTTGGAAGACCTTAGGAAGACTAGGCAACTGTTAGAGAGCGCTTCGGACGGAGTCTCCGGTTTTTGG
AGATTCTGGTTCGCTAGTGAATTAGCTAGGGTAGTTTTTAGGATAAAACAGGACTATAAACAAGAATTTGAAAAGTT
GTTGGTAGATTGCCCAGGACTTTTTGAAGCTCTTAATTTGGGCCATCAGGTTCACTTTAAAGAAAAAGTTTTATCAG
TTTTAGACTTTTCAACCCCAGGTAGAACTGCTGCTGCTGTGGCTTTTCTTACTTTTATATTAGATAAATGGATCCCG
CAGACTCATTTCAGCAGGGGATACGTTTTGGATTTCATAGCCACAGCATTGTGGAGAACATGGAAGGTTCGCAAGAT
GAGGACAATCTTAGGTTACTGGCCAGTGCAGCCTTTGGGTGTAGCGGGAATCCTGAGGCATCCACCGGTCATGCCAG
CGGTTCTGGAGGAGGAACAGCAAGAGGACAACCCGAGAGCCGGCCTGGACCCTCCAGTGGAGGAGGCGGAGTAGCTG
ACTTGTCTCCTGAACTGCAACGGGTGCTTACTGGATCTACGTCCACTGGACGGGATAGGGGCGTTAAGAGGGAGAGG
GCATCCAGTGGTACTGATGCTAGATCTGAGTTGGCTTTAAGTTTAATGAGTCGCAGACGTCCTGAAACCATTTGGTG
GCATGAGGTTCAGAAAGAGGGAAGGGATGAAGTTTCTGTATTGCAGGAGAAATATTCACTGGAACAGGTGAAAACAT
GTTGGTTGGAGCCAGAGGATGATTGGGAGGTGGCCATTAAAAATTATGCCAAGATAGCTTTGAGGCCTGATAAACAG
TATAAGATCAGTAGACGGATTAATATCCGGAATGCTTGTTACATATCTGGAAATGGGGCTGAGGTGGTAATAGATAC
TCAAGACAAGACAGTTATTAGATGCTGCATGATGGATATGTGGCCTGGAGTAGTCGGTATGGAAGCAGTCACTTTTG
TAAATGTTAAGTTTAGGGGAGATGGTTATAATGGAATAGTGTTTATGGCCAATACCAAACTTATATTGCATGGTTGT
AGCTTTTTTGGTTTCAACAATACCTGTGTAGATGCCTGGGGACAGGTTAGTGTACGGGGGTGTAGTTTCTATGCGTG
TTGGATTGCCACAGCTGGCAGAACCAAGAGTCAATTGTCTCTGAAGAAATGCATATTCCAAAGATGTAACCTGGGCA
TTCTGAATGAAGGCGAAGCAAGGGTCCGTCACTGCGCTTCTACAGATACTGGATGTTTTATTTTAATTAAGGGAAAT
GCCAGCGTAAAGCATAACATGATTTGTGGTGCTTCCGATGAGAGGCCTTATCAAATGCTCACTTGTGCTGGTGGGCA
TTGTAATATGCTGGCTACTGTGCATATTGTTTCCCATCAACGCAAAAAATGGCCTGTTTTTGATCACAATGTGTTGA
CCAAGTGCACCATGCATGCAGGTGGGCGTAGAGGAATGTTTATGCCTTACCAGTGTAACATGAATCATGTGAAAGTG
TTGTTGGAACCAGATGCCTTTTCCAGAATGAGCCTAACAGGAATCTTTGACATGAACACGCAAATCTGGAAGATCCT
GAGGTATGATGATACGAGATCGAGGGTGCGCGCATGCGAATGCGGAGGCAAGCATGCCAGGTTCCAGCCGGTGTGTG
TAGATGTGACCGAAGATCTCAGACCGGATCATTTGGTTATTGCCCGCACTGGAGCAGAGTTCGGATCCAGTGGAGAA
GAAACTGACTAAGGTGAGTATTGGGAAAACTTTGGGGTGGGATTTTCAGATGGACAGATTGAGTAAAAATTTGTTTT
TTCTGTCTTGCAGCTGACATGAGTGGAAATGCTTCTTTTAAGGGGGGAGTCTTCAGCCCTTATCTGACAGGGCGTCT
CCCATCCTGGGCAGGAGTTCGTCAGAATGTTATGGGATCTACTGTGGATGGAAGACCCGTTCAACCCGCCAATTCTT
CAACGCTGACCTATGCTACTTTAAGTTCTTCACCTTTGGACGCAGCTGCAGCCGCTGCCGCCGCCTCTGTCGCCGCT
AACACTGTGCTTGGAATGGGTTACTATGGAAGCATCGTGGCTAATTCCACTTCCTCTAATAACCCTTCTACACTGAC
TCAGGACAAGTTACTTGTCCTTTTGGCCCAGCTGGAGGCTTTGACCCAACGTCTGGGTGAACTTTCTCAGCAGGTGG
CCGAGTTGCGAGTACAAACTGAGTCTGCTGTCGGCACGGCAAAGTCTAAATAAAAAAAATTCCAGAATCAATGAATA
AATAAACGAGCTTGTTGTTGATTTAAAATCAAGTGTTTTTATTTCATTTTTCGCGCACGGTATGCCCTGGACCACCG
ATCTCGATCATTGAGAACTCGGTGGATTTTTTCCAGAATCCTATAGAGGTGGGATTGAATGTTTAGATACATGGGCA
TTAGGCCGTCTTTGGGGTGGAGATAGCTCCATTGAAGGGATTCATGCTCCGGGGTAGTGTTGTAAATCACCCAGTCA
TAACAAGGTCGCAGTGCATGGTGTTGCACAATATCTTTTAGAAGTAGGCTGATTGCCACAGATAAGCCCTTGGTGTA
GGTGTTTACAAACCGGTTGAGCTGGGAGGGGTGCATTCGAGGTGAAATTATGTGCATTTTGGATTGGATTTTTAAGT
TGGCAATATTGCCGCCAAGATCCCGTCTTGGGTTCATGTTATGAAGGACTACCAAGACGGTGTATCCGGTACATTTA
GGAAATTTATCGTGCAGCTTGGATGGAAAAGCGTGGAAAAATTTGGAGACACCCTTGTGTCCTCCGAGATTTTCCAT
GCACTCATCCATGATAATAGCAATGGGGCCGTGGGCAGCGGCGCGGGCAAACACGTTCCGTGGGTCTGACACATCAT
AGTTATGTTCCTGAGTTAAATCATCATAAGCCATTTTAATGAATTTGGGGCGGAGCGTACCAGATTGGGGTATGAAT
GTTCCTTCGGGCCCCGGAGCATAGTTCCCCTCACAGATTTGCATTTCCCAAGCTTTCAGTTCTGAGGGTGGAATCAT
GTCCACCTGGGGGGCTATGAAGAACACCGTTTCGGGGGCGGGGGTGATTAGTTGGGATGATAGCAAGTTTCTGAGCA
ATTGAGATTTGCCACATCCGGTGGGGCCATAAATAATTCCGATTACAGGTTGCAGGTGGTAGTTTAGGGAACGGCAA
CTGCCGTCTTCTCGAAGCAAGGGGGCCACCTCGTTCATCATTTCCCTTACATGCATATTTTCCCGCACCAAATCCAT
TAGGAGGCGCTCTCCTCCTAGTGATAGAAGTTCTTGTAGTGAGGAAAAGTTTTTCAGCGGTTTTAGACCGTCAGCCA
TGGGCATTTTGGAAAGAGTTTGCTGCAAAAGTTCTAGTCTGTTCCACAGTTCAGTGATGTGTTCTATGGCATCTCGA
TCCAGCAGACCTCCTCGTTTCGCGGGTTTGGACGGCTCCTGGAGTAGGGTATGAGACGATGGGCGTCCAGCGCTGCC
AGGGTTCGGTCCTTCCAGGGTCTCAGTGTTCGAGTCAGGGTTGTTTCCGTCACAGTGAAGGGGTGTGCGCCTGCTTG
GGCGCTTGCCAGGGTGCGCTTCAGACTCATTCTGCTGGTGGAGAACTTCTGTCGCTTGGCGCCCTGTATGTCGGCCA
AGTAGCAGTTTACCATGAGTTCGTAGTTGAGCGCCTCGGCTGCGTGGCCTTTGGCGCGGAGCTTACCTTTGGAAGTT
TTCTTGCATACCGGGCAGTATAGGCATTTCAGCGCATACAGCTTGGGCGCAAGGAAAATGGATTCTGGGGAGTATGC
ATCCGCGCCGCAGGAGGCGCAAACAGTTTCACATTCCACCAGCCAGGTTAAATCCGGTTCATTGGGGTCAAAAACAA
GTTTTCCGCCATATTTTTTGATGCGTTTCTTACCTTTGGTCTCCATAAGTTCGTGTCCTCGTTGAGTGACAAACAGG
CTGTCCGTATCTCCGTAGACTGATTTTACAGGCCTCTTCTCCAGTGGAGTGCCTCGGTCTTCTTCGTACAGGAACTC
TGACCACTCTGATACAAAGGCGCGCGTCCAGGCCAGCACAAAGGAGGCTATGTGGGAGGGGTAGCGATCGTTGTCAA
CCAGGGGGTCCACCTTTTCCAAAGTATGCAAACACATGTCACCCTCTTCAACATCCAGGAATGTGATTGGCTTGTAG
GTGTATTTCACGTGACCTGGGGTCCCCGCTGGGGGGGTATAAAAGGGGGCGGTTCTTTGCTCTTCCTCACTGTCTTC
CGGATCGCTGTCCAGGAACGTCAGCTGTTGGGGTAGGTATTCCCTCTCGAAGGCGGGCATGACCTCTGCACTCAGGT
TGTCAGTTTCTAAGAACGAGGAGGATTTGATATTGACAGTGCCGGTTGAGATGCCTTTCATGAGGTTTTCGTCCATT
TGGTCAGAAAACACAATTTTTTTATTGTCAAGTTTGGTGGCAAATGATCCATACAGGGCGTTGGATAAAAGTTTGGC
AATGGATCGCATGGTTTGGTTCTTTTCCTTGTCCGCGCGCTCTTTGGCGGCGATGTTGAGTTGGACATACTCGCGTG
CCAGGCACTTCCATTCGGGGAAGATAGTTGTTAATTCATCTGGCACGATTCTCACTTGCCACCCTCGATTATGCAAG
GTAATTAAATCCACACTGGTGGCCACCTCGCCTCGAAGGGGTTCATTGGTCCAACAGAGCCTACCTCCTTTCCTAGA
ACAGAAAGGGGGAAGTGGGTCTAGCATAAGTTCATCGGGAGGGTCTGCATCCATGGTAAAGATTCCCGGAAGTAAAT
CCTTATCAAAATAGCTGATGGGAGTGGGGTCATCTAAGGCCATTTGCCATTCTCGAGCTGCCAGTGCGCGCTCATAT
GGGTTAAGGGGACTGCCCCAGGGCATGGGATGGGTGAGAGCAGAGGCATACATGCCACAGATGTCATAGACGTAGAT
GGGATCCTCAAAGATGCCTATGTAGGTTGGATAGCATCGCCCCCCTCTGATACTTGCTCGCACATAGTCATATAGTT
CATGTGATGGCGCTAGCAGCCCCGGACCCAAGTTGGTGCGATTGGGTTTTTCTGTTCTGTAGACGATCTGGCGAAAG
ATGGCGTGAGAATTGGAAGAGATGGTGGGTCTTTGAAAAATGTTGAAATGGGCATGAGGTAGACCTACAGAGTCTCT
GACAAAGTGGGCATAAGATTCTTGAAGCTTGGTTACCAGTTCGGCGGTGACAAGTACGTCTAGGGCGCAGTAGTCAA
GTGTTTCTTGAATGATGTCATAACCTGGTTGGTTTTTCTTTTCCCACAGTTCGCGGTTGAGAAGGTATTCTTCGCGA
TCCTTCCAGTACTCTTCTAGCGGAAACCCGTCTTTGTCTGCACGGTAAGATCCTAGCATGTAGAACTGATTAACTGC
CTTGTAAGGGCAGCAGCCCTTCTCTACGGGTAGAGAGTATGCTTGAGCAGCTTTTCGTAGCGAAGCGTGAGTAAGGG
CAAAGGTGTCTCTGACCATGACTTTGAGAAATTGGTATTTGAAGTCCATGTCGTCACAGGCTCCCTGTTCCCAGAGT
TGGAAGTCTACCCGTTTCTTGTAGGCGGGGTTGGGCAAAGCGAAAGTAACATCATTGAAGAGAATCTTACCGGCTCT
GGGCATAAAATTGCGAGTGATGCGGAAAGGCTGTGGTACTTCCGCTCGATTGTTGATCACCTGGGCAGCTAGGACGA
TTTCGTCGAAACCGTTGATGTTGTGTCCTACGATGTATAATTCTATGAAACGCGGCGTGCCTCTGACGTGAGGTAGC
TTACTGAGCTCATCAAAGGTTAGGTCTGTGGGGTCAGATAAGGCGTAGTGTTCGAGAGCCCATTCGTGCAGGTGAGG
ATTTGCATGTAGGAATGATGACCAAAGATCTACCGCCAGTGCTGTTTGTAACTGGTCCCGATACTGACGAAAATGCC
GGCCAATTGCCATTTTTTCTGGAGTGACACAGTAGAAGGTTCTGGGGTCTTGTTGCCATCGATCCCACTTGAGTTTA
ATGGCTAGATCGTGGGCCATGTTGACGAGACGCTCTTCTCCTGAGAGTTTCATGACCAGCATGAAAGGAACTAGTTG
TTTGCCAAAGGATCCCATCCAGGTGTAAGTTTCCACATCGTAGGTCAGGAAGAGTCTTTCTGTGCGAGGATGAGAGC
CGATCGGGAAGAACTGGATTTCCTGCCACCAGTTGGAGGATTGGCTGTTGATGTGATGGAAGTAGAAGTTTCTGCGG
CGCGCCGAGCATTCGTGTTTGTGCTTGTACAGACGGCCGCAGTAGTCGCAGCGTTGCACGGGTTGTATCTCGTGAAT
GAGCTGTACCTGGCTTCCCTTGACGAGAAATTTCAGTGGGAAGCCGAGGCCTGGCGATTGTATCTCGTGCTCTTCTA
TATTCGCTGTATCGGCCTGTTCATCTTCTGTTTCGATGGTGGTCATGCTGACGAGCCCCCGCGGGAGGCAAGTCCAG
ACCTCGGCGCGGGAGGGGCGGAGCTGAAGGACGAGAGCGCGCAGGCTGGAGCTGTCCAGAGTCCTGAGACGCTGCGG
ACTCAGGTTAGTAGGTAGGGACAGAAGATTAACTTGCATGATCTTTTCCAGGGCGTGCGGGAGGTTCAGATGGTACT
TGATTTCCACAGGTTCGTTTGTAGAGACGTCAATGGCTTGCAGGGTTCCGTGTCCTTTGGGCGCCACTACCGTACCT
TTGTTTTTTCTTTTGATCGGTGGTGGCTCTCTTGCTTCTTGCATGCTCAGAAGCGGTGACGGGGACGCGCGCCGGGC
GGCAGCGGTTGTTCCGGACCCGGGGGCATGGCTGGTAGTGGCACGTCGGCGCCGCGCACGGGCAGGTTCTGGTATTG
CGCTCTGAGAAGACTTGCGTGCGCCACCACGCGTCGATTGACGTCTTGTATCTGACGTCTCTGGGTGAAAGCTACCG
GCCCCGTGAGCTTGAACCTGAAAGAGAGTTCAACAGAATCAATTTCGGTATCGTTAACGGCAGCTTGTCTCAGTATT
TCTTGTACGTCACCAGAGTTGTCCTGGTAGGCGATCTCCGCCATGAACTGCTCGATTTCTTCCTCCTGAAGATCTCC
GCGACCCGCTCTTTCGACGGTGGCCGCGAGGTCATTGGAGATACGGCCCATGAGTTGGGAGAATGCATTCATGCCCG
CCTCGTTCCAGACGCGGCTGTAAACCACGGCCCCCTCGGAGTCTCTTGCGCGCATCACCACCTGAGCGAGGTTAAGC
TCCACGTGTCTGGTTAAGACCGCATAGTTGCATAGGCGCTGAAAAAGGTAGTTGAGTGTGGTGGCAATGTGTTCGGC
GACGAAGAAATACATGATCCATCGTCTCAGCGGCATTTCGCTAACATCGCCCAGAGCTTCCAAGCGCTCCATGGCCT
CGTAGAAGTCCACGGCAAAATTAAAAAACTGGGAGTTTCGCGCGGACACGGTCAATTCCTCCTCGAGAAGACGGATG
AGTTCGGCTATGGTGGCCCGTACTTCGCGTTCGAAGGCTCCCGGGATCTCTTCTTCCTCTTCTATCTCTTCTTCCAC
TAACATCTCTTCTTCGTCTTCAGGCGGGGGCGGAGGGGGCACGCGGCGACGTCGACGGCGCACGGGCAAACGGTCGA
TGAATCGTTCAATGACCTCTCCGCGGCGGCGGCGCATGGTTTCAGTGACGGCGCGGCCGTTCTCGCGCGGTCGCAGA
GTAAAAACACCGCCGCGCATCTCCTTAAAGTGGTGACTGGGAGGTTCTCCGTTTGGGAGGGAGAGGGCGCTGATTAT
ACATTTTATTAATTGGCCCGTAGGGACTGCGCGCAGAGATCTGATCGTGTCAAGATCCACGGGATCTGAAAACCTTT
CGACGAAAGCGTCTAACCAGTCACAGTCACAAGGTAGGCTGAGTACGGCTTCTTGTGGGCGGGGGTGGTTATGTGTT
CGGTCTGGGTCTTCTGTTTCTTCTTCATCTCGGGAAGGTGAGACGATGCTGCTGGTGATGAAATTAAAGTAGGCAGT
TCTAAGACGGCGGATGGTGGCGAGGAGCACCAGGTCTTTGGGTCCGGCTTGCTGGATACGCAGGCGATTGGCCATTC
CCCAAGCATTATCCTGACATCTAGCAAGATCTTTGTAGTAGTCTTGCATGAGCCGTTCTACGGGCACTTCTTCCTCA
CCCGTTCTGCCATGCATACGTGTGAGTCCAAATCCGCGCATTGGTTGTACCAGTGCCAAGTCAGCTACGACTCTTTC
GGCGAGGATGGCTTGCTGTACTTGGGTAAGGGTGGCTTGAAAGTCATCAAAATCCACAAAGCGGTGGTAAGCCCCTG
TATTAATGGTGTAAGCACAGTTGGCCATGACTGACCAGTTAACTGTCTGGTGACCAGGGCGCACGAGCTCGGTGTAT
TTAAGGCGCGAATAGGCGCGGGTGTCAAAGATGTAATCGTTGCAGGTGCGCACCAGATACTGGTACCCTATAAGAAA
ATGCGGCGGTGGTTGGCGGTAGAGAGGCCATCGTTCTGTAGCTGGAGCGCCAGGGGCGAGGTCTTCCAACATAAGGC
GGTGATAGCCGTAGATGTACCTGGACATCCAGGTGATTCCTGCGGCGGTAGTAGAAGCCCGAGGAAACTCGCGTACG
CGGTTCCAAATGTTGCGTAGCGGCATGAAGTAGTTCATTGTAGGCACGGTTTGACCAGTGAGGCGCGCGCAGTCATT
GATGCTCTATAGACACGGAGAAAATGAAAGCGTTCAGCGACTCGACTCCGTAGCCTGGAGGAACGTGAACGGGTTGG
GTCGCGGTGTACCCCGGTTCGAGACTTGTACTCGAGCCGGCCGGAGCCGCGGCTAACGTGGTATTGGCACTCCCGTC
TCGACCCAGCCTACAAAAATCCAGGATACGGAATCGAGTCGTTTTGCTGGTTTCCGAATGGCAGGGAAGTGAGTCCT
ATTTTTTTTTTTTTTTGCCGCTCAGAATGCATCCCGTGCTGCGACAGATGCGCCCCCAACAACAGCCCCCCTCGCAG
CAGCAGCAGCAGCAACCACAAAAGGCTGTCCCTGCAACTACTGCAACTGCCGCCGTGAGCGGTGCGGGACAGCCCGC
CTATGATCTGGACTTGGAAGAGGGCGAAGGACTGGCACGTCTAGGTGCGCCTTCGCCCGAGCGGCATCCGCGAGTTC
AACTGAAAAAAGATTCTCGCGAGGCGTATGTGCCCCAACAGAACCTATTTAGAGACAGAAGCGGCGAGGAGCCGGAG
GAGATGCGAGCTTCCCGCTTTAACGCGGGTCGTGAGCTGCGTCACGGTTTGGACCGAAGACGAGTGTTGCGAGACGA
GGATTTCGAAGTTGATGAAGTGACAGGGATCAGTCCTGCCAGGGCACACGTGGCTGCAGCCAACCTTGTATCGGCTT
ACGAGCAGACAGTAAAGGAAGAGCGTAACTTCCAAAAGTCTTTTAATAATCATGTGCGAACCCTGATTGCCCGCGAA
GAAGTTACCCTTGGTTTGATGCATTTGTGGGATTTGATGGAAGCTATCATTCAGAACCCTACTAGCAAACCTCTGAC
CGCCCAGCTGTTTCTGGTGGTGCAACACAGCAGAGACAATGAGGCTTTCAGAGAGGCGCTGCTGAACATCACCGAAC
CCGAGGGGAGATGGTTGTATGATCTTATCAACATTCTACAGAGTATCATAGTGCAGGAGCGGAGCCTGGGCCTGGCC
GAGAAGGTAGCTGCCATCAATTACTCGGTTTTGAGCTTGGGAAAATATTACGCTCGCAAAATCTACAAGACTCCATA
CGTTCCCATAGACAAGGAGGTGAAGATAGATGGGTTCTACATGCGCATGACGCTCAAGGTCTTGACCCTGAGCGATG
ATCTTGGGGTGTATCGCAATGACAGAATGCATCGCGCGGTTAGCGCCAGCAGGAGGCGCGAGTTAAGCGACAGGGAA
CTGATGCACAGTTTGCAAAGAGCTCTGACTGGAGCTGGAACCGAGGGTGAGAATTACTTCGACATGGGAGCTGACTT
GCAGTGGCAGCCTAATCGCAGGGCTCTGAGCGCCGCGACGGCAGGATGTGAGCTTCCTTACATAGAAGAGGCGGATG
AAGGCGAGGAGGAAGAGGGCGAGTACTTGGAAGACTGATGGCACAACCCGTGTTTTTTGCTAGATGGAACAGCAAGC
ACCGGATCCCGCAATGCGGGCGGCGCTGCAGAGCCAGCCGTCCGGCATTAACTCCTCGGACGATTGGACCCAGGCCA
TGCAACGTATCATGGCGTTGACGACTCGCAACCCCGAAGCCTTTAGACAGCAACCCCAGGCCAACCGTCTATCGGCC
ATCATGGAAGCTGTAGTGCCTTCCCGATCTAATCCCACTCATGAGAAGGTCCTGGCCATCGTGAACGCGTTGGTGGA
GAACAAAGCTATTCGTCCAGATGAGGCCGGACTGGTATACAACGCTCTCTTAGAACGCGTGGCTCGCTACAACAGTA
GCAATGTGCAAACCAATTTGGACCGTATGATAACAGATGTACGCGAAGCCGTGTCTCAGCGCGAAAGGTTCCAGCGT
GATGCCAACCTGGGTTCGCTGGTGGCGTTAAATGCTTTCTTGAGTACTCAGCCTGCTAATGTGCCGCGTGGTCAACA
GGATTATACTAACTTTTTAAGTGCTTTGAGACTGATGGTATCAGAAGTACCTCAGAGCGAAGTGTATCAGTCCGGTC
CTGATTACTTCTTTCAGACTAGCAGACAGGGCTTGCAGACGGTAAATCTGAGCCAAGCTTTTAAAAACCTTAAAGGT
TTGTGGGGAGTGCATGCCCCGGTAGGAGAAAGAGCAACCGTGTCTAGCTTGTTAACTCCGAACTCCCGCCTGTTATT
ACTGTTGGTAGCTCCTTTCACCGACAGCGGTAGCATCGACCGTAATTCCTATTTGGGTTACCTACTAAACCTGTATC
GCGAAGCCATAGGGCAAAGTCAGGTGGACGAGCAGACCTATCAAGAAATTACCCAAGTCAGTCGCGCTTTGGGACAG
GAAGACACTGGCAGTTTGGAAGCCACTCTGAACTTCTTGCTTACCAATCGGTCTCAAAAGATCCCTCCTCAATATGC
TCTTACTGCGGAGGAGGAGAGGATCCTTAGATATGTGCAGCAGAGCGTGGGATTGTTTCTGATGCAAGAGGGGGCAA
CTCCGACTGCAGCACTGGACATGACAGCGCGAAATATGGAGCCCAGCATGTATGCCAGTAACCGACCTTTCATTAAC
AAACTGCTGGACTACTTGCACAGAGCTGCCGCTATGAACTCTGATTATTTCACCAATGCCATCTTAAACCCGCACTG
GCTGCCCCCACCTGGTTTCTACACGGGCGAATATGACATGCCCGACCCTAATGACGGATTTCTGTGGGACGACGTGG
ACAGCGATGTTTTTTCACCTCTTTCTGATCATCGCACGTGGAAAAAGGAAGGCGGTGATAGAATGCATTCTTCTGCA
TCGCTGTCCGGGGTCATGGGTGCTACCGCGGCTGAGCCCGAGTCTGCAAGTCCTTTTCCTAGTCTACCCTTTTCTCT
ACACAGTGTACGTAGCAGCGAAGTGGGTAGAATAAGTCGCCCGAGTTTAATGGGCGAAGAGGAGTACCTAAACGATT
CCTTGCTCAGACCGGCAAGAGAAAAAAATTTCCCAAACAATGGAATAGAAAGTTTGGTGGATAAAATGAGTAGATGG
AAGACTTATGCTCAGGATCACAGAGACGAGCCTGGGATCATGGGGACTACAAGTAGAGCGAGCCGTAGACGCCAGCG
CCATGACAGACAGAGGGGTCTTGTGTGGGACGATGAGGATTCGGCCGATGATAGCAGCGTGTTGGACTTGGGTGGGA
GAGGAAGGGGCAACCCGTTTGCTCATTTGCGCCCTCGCTTGGGTGGTATGTTGTGAAAAAAAATAAAAAAGAAAAAC
TCACCAAGGCCATGGCGACGAGCGTACGTTCGTTCTTCTTTATTATCTGTGTCTAGTATAATGAGGCGAGTCGTGCT
AGGCGGAGCGGTGGTGTATCCGGAGGGTCCTCCTCCTTCGTACGAGAGCGTGATGCAGCAGCAGCAGGCGACGGCGG
TGATGCAATCCCCACTGGAGGCTCCCTTTGTGCCTCCGCGATACCTGGCACCTACGGAGGGCAGAAACAGCATTCGT
TACTCGGAACTGGCACCTCAGTACGATACCACCAGGTTGTATCTGGTGGACAACAAGTCGGCGGACATTGCTTCTCT
GAACTATCAGAATGACCACAGCAACTTCTTGACCACGGTGGTGCAGAACAATGACTTTACCCCTACGGAAGCCAGCA
CCCAGACCATTAACTTTGATGAACGATCGCGGTGGGGCGGTCAGCTAAAGACCATCATGCATACTAACATGCCAAAC
GTGAACGAGTATATGTTTAGTAACAAGTTCAAAGCGCGTGTGATGGTGTCCAGAAAACCTCCCGACGGTGCTGCAGT
TGGGGATACTTATGATCACAAGCAGGATATTTTGGAATATGAGTGGTTCGAGTTTACTTTGCCAGAAGGCAACTTTT
CAGTTACTATGACTATTGATTTGATGAACAATGCCATCATAGATAATTACTTGAAAGTGGGTAGACAGAATGGAGTG
CTTGAAAGTGACATTGGTGTTAAGTTCGACACCAGGAACTTCAAGCTGGGATGGGATCCCGAAACCAAGTTGATCAT
GCCTGGAGTGTATACGTATGAAGCCTTCCATCCTGACATTGTCTTACTGCCTGGCTGCGGAGTGGATTTTACCGAGA
GTCGTTTGAGCAACCTTCTTGGTATCAGAAAAAAACAGCCATTTCAAGAGGGTTTTAAGATTTTGTATGAAGATTTA
GAAGGTGGTAATATTCCGGCCCTCTTGGATGTAGATGCCTATGAGAACAGTAAGAAAGAACAAAAAGCCAAAATAGA
AGCTGCTACAGCTGCTGCAGAAGCTAAGGCAAACATAGTTGCCAGCGACTCTACAAGGGTTGCTAACGCTGGAGAGG
TCAGAGGAGACAATTTTGCGCCAACACCTGTTCCGACTGCAGAATCATTATTGGCCGATGTGTCTGAAGGAACGGAC
GTGAAACTCACTATTCAACCTGTAGAAAAAGATAGTAAGAATAGAAGCTATAATGTGTTGGAAGACAAAATCAACAC
AGCCTATCGCAGTTGGTATCTTTCGTACAATTATGGCGATCCCGAAAAAGGAGTGCGTTCCTGGACATTGCTCACCA
CCTCAGATGTCACCTGCGGAGCAGAGCAGGTTTACTGGTCGCTTCCAGACATGATGAAGGATCCTGTCACTTTCCGC
TCCACTAGACAAGTCAGTAACTACCCTGTGGTGGGTGCAGAGCTTATGCCCGTCTTCTCAAAGAGCTTCTACAACGA
ACAAGCTGTGTACTCCCAGCAGCTCCGCCAGTCCACCTCGCTTACGCACGTCTTCAACCGCTTTCCTGAGAACCAGA
TTTTAATCCGTCCGCCGGCGCCCACCATTACCACCGTCAGTGAAAACGTTCCTGCTCTCACAGATCACGGGACCCTG
CCGTTGCGCAGCAGTATCCGGGGAGTCCAACGTGTGACCGTTACTGACGCCAGACGCCGCACCTGTCCCTACGTGTA
CAAGGCACTGGGCATAGTCGCACCGCGCGTCCTTTCAAGCCGCACTTTCTAAAAAAAAAATGTCCATTCTTATCTCG
CCCAGTAATAACACCGGTTGGGGTCTGCGCGCTCCAAGCAAGATGTACGGAGGCGCACGCAAACGTTCTACCCAACA
TCCCGTGCGTGTTCGCGGACATTTTCGCGCTCCATGGGGTGCCCTCAAGGGCCGCACTCGCGTTCGAACCACCGTCG
ATGATGTAATCGATCAGGTGGTTGCCGACGCCCGTAATTATACTCCTACTGCGCCTACATCTACTGTGGATGCAGTT
ATTGACAGTGTAGTGGCTGACGCTCGCAACTATGCTCGACGTAAGAGCCGGCGAAGGCGCATTGCCAGACGCCACCG
AGCTACCACTGCCATGCGAGCCGCAAGAGCTCTGCTACGAAGAGCTAGACGCGTGGGGCGAAGAGCCATGCTTAGGG
CGGCCAGACGTGCAGCTTCGGGCGCCAGCGCCGGCAGGTCCCGCAGGCAAGCAGCCGCTGTCGCAGCGGCGACTATT
GCCGACATGGCCCAATCGCGAAGAGGCAATGTATACTGGGTGCGTGACGCTGCCACCGGTCAACGTGTACCCGTGCG
CACCCGTCCCCCTCGCACTTAGAAGATACTGAGCAGTCTCCGATGTTGTGTCCCAGCGGCGAGGATGTCCAAGCGCA
AATACAAGGAAGAAATGCTGCAGGTTATCGCACCTGAAGTCTACGGCCAACCGTTGAAGGATGAAAAAAAACCCCGC
AAAATCAAGCGGGTTAAAAAGGACAAAAAAGAAGAGGAAGATGGCGATGATGGGCTGGCGGAGTTTGTGCGCGAGTT
TGCCCCACGGCGACGCGTGCAATGGCGTGGGCGCAAAGTTCGACATGTGTTGAGACCTGGAACTTCGGTGGTCTTTA
CACCCGGCGAGCGTTCAAGCGCTACTTTTAAGCGTTCCTATGATGAGGTGTACGGGGATGATGATATTCTTGAGCAG
GCGGCTGACCGATTAGGCGAGTTTGCTTATGGCAAGCGTAGTAGAATAACTTCCAAGGATGAGACAGTGTCAATACC
CTTGGATCATGGAAATCCCACCCCTAGTCTTAAACCGGTCACTTTGCAGCAAGTGTTACCCGTAACTCCGCGAACAG
GTGTTAAACGCGAAGGTGAAGATTTGTATCCCACTATGCAACTGATGGTACCCAAACGCCAGAAGTTGGAGGACGTT
TTGGAGAAAGTAAAAGTGGATCCAGATATTCAACCTGAGGTTAAAGTGAGACCCATTAAGCAGGTAGCGCCTGGTCT
GGGGGTACAAACTGTAGACATTAAGATTCCCACTGAAAGTATGGAAGTGCAAACTGAACCCGCAAAGCCTACTGCCA
CCTCCACTGAAGTGCAAACGGATCCATGGATGCCCATGCCTATTACAACTGACGCCGCCGGTCCCACTCGAAGATCC
CGACGAAAGTACGGTCCAGCAAGTCTGTTGATGCCCAATTATGTTGTACACCCATCTATTATTCCTACTCCTGGTTA
CCGAGGCACTCGCTACTATCGCAGCCGAAACAGTACCTCCCGCCGTCGCCGCAAGACACCTGCAAATCGCAGTCGTC
GCCGTAGACGCACAAGCAAACCGACTCCCGGCGCCCTGGTGCGGCAAGTGTACCGCAATGGTAGTGCGGAACCTTTG
ACACTGCCGCGTGCGCGTTACCATCCGAGTATCATCACTTAATCAATGTTGCCGCTGCCTCCTTGCAGATATGGCCC
TCACTTGTCGCCTTCGCGTTCCCATCACTGGTTACCGAGGAAGAAACTCGCGCCGTAGAAGAGGGATGTTGGGACGC
GGAATGCGACGCTACAGGCGACGGCGTGCTATCCGCAAGCAATTGCGGGGTGGTTTTTTACCAGCCTTAATTCCAAT
TATCGCTGCTGCAATTGGCGCGATACCAGGCATAGCTTCCGTGGCGGTTCAGGCCTCGCAACGACATTGACATTGGA
AAAAAAACGTATAAATAAAAAAAAATACAATGGACTCTGACACTCCTGGTCCTGTGACTATGTTTTCTTAGAGATGG
AAGACATCAATTTTTCATCCTTGGCTCCGCGACACGGCACGAAGCCGTACATGGGCACCTGGAGCGACATCGGCACG
AGCCAACTGAACGGGGGCGCCTTCAATTGGAGCAGTATCTGGAGCGGGCTTAAAAATTTTGGCTCAACCATAAAAAC
ATACGGGAACAAAGCTTGGAACAGCAGTACAGGACAGGCGCTTAGAAATAAACTTAAAGACCAGAACTTCCAACAAA
AAGTAGTCGATGGGATAGCTTCCGGCATCAATGGAGTGGTAGATTTGGCTAACCAGGCTGTGCAGAAAAAGATAAAC
AGTCGTTTGGACCCGCCGCCAGCAACCCCAGGTGAAATGCAAGTGGAGGAAGAAATTCCTCCGCCAGAAAAACGAGG
CGACAAGCGTCCGCGTCCCGATTTGGAAGAGACGCTGGTGACGCGCGTAGATGAACCGCCTTCTTATGAGGAAGCAA
CGAAGCTTGGAATGCCCACCACTAGACCGATAGCCCCAATGGCCACCGGGGTGATGAAACCTTCTCAGTTGCATCGA
CCCGTCACCTTGGATTTGCCCCCTCCCCCTGCTGCTACTGCTGTACCCGCTTCTAAGCCTGTCGCTGCCCCGAAACC
AGTCGCCGTAGCCAGGTCACGTCCCGGGGGCGCTCCTCGTCCAAATGCGCACTGGCAAAATACTCTGAACAGCATCG
TGGGTCTAGGCGTGCAAAGTGTAAAACGCCGTCGCTGCTTTTAATTAAATATGGAGTAGCGCTTAACTTGCCTATCT
GTGTATATGTGTCATTACACGCCGTCACAGCAGCAGAGGAAAAAAGGAAGAGGTCGTGCGTCGACGCTGAGTTACTT
TCAAGATGGCCACCCCATCGATGCTGCCCCAATGGGCATACATGCACATCGCCGGACAGGATGCTTCGGAGTACCTG
AGTCCGGGTCTGGTGCAGTTCGCCCGCGCCACAGACACCTACTTCAATCTGGGAAATAAGTTTAGAAATCCCACCGT
AGCGCCGACCCACGATGTGACCACCGACCGTAGCCAGCGGCTCATGTTGCGCTTCGTGCCCGTTGACCGGGAGGACA
ATACATACTCTTACAAAGTGCGGTACACCCTGGCCGTGGGCGACAACAGAGTGCTGGATATGGCCAGCACGTTCTTT
GACATTAGGGGCGTGTTGGACAGAGGTCCCAGTTTCAAACCCTATTCTGGTACGGCTTACAACTCTCTGGCTCCTAA
AGGCGCTCCAAATGCATCTCAATGGATTGCAAAAGGCGTACCAACTGCAGCAGCCGCAGGCAATGGTGAAGAAGAAC
ATGAAACAGAGGAGAAAACTGCTACTTACACTTTTGCCAATGCTCCTGTAAAAGCCGAGGCTCAAATTACAAAAGAG
GGCTTACCAATAGGTTTGGAGATTTCAGCTGAAAACGAATCTAAACCCATCTATGCAGATAAACTTTATCAGCCAGA
ACCTCAAGTGGGAGATGAAACTTGGACTGACCTAGACGGAAAAACCGAAGAGTATGGAGGCAGGGCTCTAAAGCCTA
CTACTAACATGAAACCCTGTTACGGGTCCTATGCGAAGCCTACTAATTTAAAAGGTGGTCAGGCAAAACCGAAAAAC
TCGGAACCGTCGAGTGAAAAAATTGAATATGATATTGACATGGAATTTTTTGATAACTCATCGCAAAGAACAAACTT
CAGTCCTAAAATTGTCATGTATGCAGAAAATGTAGGTTTGGAAACGCCAGACACTCATGTAGTGTACAAACCTGGAA
CAGAAGACACAAGTTCCGAAGCTAATTTGGGACAACAGTCTATGCCCAACAGACCCAACTACATTGGCTTCAGAGAT
AACTTTATTGGACTCATGTACTATAACAGTACTGGTAACATGGGGGTGCTGGCTGGTCAAGCGTCTCAGTTAAATGC
AGTGGTTGACTTGCAGGACAGAAACACAGAACTTTCTTACCAACTCTTGCTTGACTCTCTGGGCGACAGAACCAGAT
ACTTTAGCATGTGGAATCAGGCTGTGGACAGTTATGATCCTGATGTACGTGTTATTGAAAATCATGGTGTGGAAGAT
GAACTTCCCAACTATTGTTTTCCACTGGACGGCATAGGTGTTCCAACAACCAGTTACAAATCAATAGTTCCAAATGG
AGAAGATAATAATAATTGGAAAGAACCTGAAGTAAATGGAACAAGTGAGATCGGACAGGGTAATTTGTTTGCCATGG
AAATTAACCTTCAAGCCAATCTATGGCGAAGTTTCCTTTATTCCAATGTGGCTCTGTATCTCCCAGACTCGTACAAA
TACACCCCGTCCAATGTCACTCTTCCAGAAAACAAAAACACCTACGACTACATGAACGGGCGGGTGGTGCCGCCATC
TCTAGTAGACACCTATGTGAACATTGGTGCCAGGTGGTCTCTGGATGCCATGGACAATGTCAACCCATTCAACCACC
ACCGTAACGCTGGCTTGCGTTACCGATCTATGCTTCTGGGTAACGGACGTTATGTGCCTTTCCACATACAAGTGCCT
CAAAAATTCTTCGCTGTTAAAAACCTGCTGCTTCTCCCAGGCTCCTACACTTATGAGTGGAACTTTAGGAAGGATGT
GAACATGGTTCTACAGAGTTCCCTCGGTAACGACCTGCGGGTAGATGGCGCCAGCATCAGTTTCACGAGCATCAACC
TCTATGCTACTTTTTTCCCCATGGCTCACAACACCGCTTCCACCCTTGAAGCCATGCTGCGGAATGACACCAATGAT
CAGTCATTCAACGACTACCTATCTGCAGCTAACATGCTCTACCCCATTCCTGCCAATGCAACCAATATTCCCATTTC
CATTCCTTCTCGCAACTGGGCGGCTTTCAGAGGCTGGTCATTTACCAGACTGAAAACCAAAGAAACTCCCTCTTTGG
GGTCTGGATTTGACCCCTACTTTGTCTATTCTGGTTCTATTCCCTACCTGGATGGTACCTTCTACCTGAACCACACT
TTTAAGAAGGTTTCCATCATGTTTGACTCTTCAGTGAGCTGGCCTGGAAATGACAGGTTACTATCTCCTAACGAATT
TGAAATAAAGCGCACTGTGGATGGCGAAGGCTACAACGTAGCCCAATGCAACATGACCAAAGACTGGTTCTTGGTAC
AGATGCTCGCCAACTACAACATCGGCTATCAGGGCTTCTACATTCCAGAAGGATACAAAGATCGCATGTATTCATTT
TTCAGAAACTTCCAGCCCATGAGCAGGCAGGTGGTTGATGAGGTCAATTACAAAGACTTCAAGGCCGTCGCCATACC
CTACCAACACAACAACTCTGGCTTTGTGGGTTACATGGCTCCGACCATGCGCCAAGGTCAACCCTATCCCGCTAACT
ATCCCTATCCACTCATTGGAACAACTGCCGTAAATAGTGTTACGCAGAAAAAGTTCTTGTGTGACAGAACCATGTGG
CGCATACCGTTCTCGAGCAACTTCATGTCTATGGGGGCCCTTACAGACTTGGGACAGAATATGCTCTATGCCAACTC
AGCTCATGCTCTGGACATGACCTTTGAGGTGGATCCCATGGATGAGCCCACCCTGCTTTATCTTCTCTTCGAAGTTT
TCGACGTGGTCAGAGTGCATCAGCCACACCGCGGCATCATCGAGGCAGTCTACCTGCGTACACCGTTCTCGGCCGGT
AACGCTACCACGTAAGAAGCTTCTTGCTTCTTGCAAATAGCAGCTGCAACCATGGCCTGCGGATCCCAAAACGGCTC
CAGCGAGCAAGAGCTCAGAGCCATTGTCCAAGACCTGGGTTGCGGACCCTATTTTTTGGGAACCTACGATAAGCGCT
TCCCGGGGTTCATGGCCCCCGATAAGCTCGCCTGTGCCATTGTAAATACGGCCGGACGTGAGACGGGGGGAGAGCAC
TGGTTGGCTTTCGGTTGGAACCCACGTTCTAACACCTGCTACCTTTTTGATCCTTTTGGATTCTCGGATGATCGTCT
CAAACAGATTTACCAGTTTGAATATGAGGGTCTCCTGCGCCGCAGCGCTCTTGCTACCAAGGACCGCTGTATTACGC
TGGAAAAATCTACCCAGACCGTGCAGGGCCCCCGTTCTGCCGCCTGCGGACTTTTCTGCTGCATGTTCCTTCACGCC
TTTGTGCACTGGCCTGACCGTCCCATGGACGGAAACCCCACCATGAAATTGCTAACTGGAGTGCCAAACAACATGCT
TCATTCTCCTAAAGTCCAGCCCACCCTGTGTGACAATCAAAAAGCACTCTACCATTTTCTTAATACCCATTCGCCTT
ATTTTCGCTCTCATCGTACACACATCGAAAGGGCCACTGCGTTCGACCGTATGGATGTTCAATAATGACTCATGTAA
ACAACGTGTTCAATAAACATCACTTTATTTTTTTACATGTATCAAGGCTCTGGATTACTTATTTATTTACAAGTCGA
ATGGGTTCTGACGAGAATCAGAATGACCCGCAGGCAGTGATACGTTGCGGAACTGATACTTGGGTTGCCACTTGAAT
TCGGGAATCACCAACTTGGGAACCGGTATATCGGGCAGGATGTCACTCCACAGCTTTCTGGTCAGCTGCAAAGCTCC
AAGCAGGTCAGGAGCCGAAATCTTGAAATCACAATTAGGACCAGTGCTCTGAGCGCGAGAGTTGCGGTACACCGGAT
TGCAGCACTGAAACACCATCAGCGACGGATGTCTCACGCTTGCCAGCACGGTGGGATCTGCAATCATGCCCACATCC
AGATCTTCAGCATTGGCAATGCTGAACGGGGTCATCTTGCAGGTCTGCCTACCCATGGCGGGCACCCAATTAGGCTT
GTGGTTGCAATCGCAGTGCAGGGGGATCAGTATCATCTTGGCCTGATCCTGTCTGATTCCTGGATACACGGCTCTCA
TGAAAGCATCATATTGCTTGAAAGCCTGCTGGGCTTTACTACCCTCGGGATAAAACATCCCGCAGGACCTGCTCGAA
AACTGGTTAGCCTGCACAGCCGGCATCATTCACACAGCAGCGGGCGTCATTGTTGGCTATTTGCACCACACTTCTGC
CCCAGCGGTTTTGGGTGATTTTGGTTCGCTCGGGATTCTCCTTTAAGGCTCGTTGTCCGTTCTCGCTGGCCACATCC
ATCTCGATAATCTGCTCCTTCTGAATCATAATATTGCCATGCAGGCACTTCAGCTTGCCCTCATAATCATTGCAGCC
ATGAGGCCACAACGCACAGCCTGTACATTCCCAATTATGGTGGGCGATCTGAGAAAAAGAATGTATCATTCCCTGCA
GAAATCTTCCCATCATCGTGCTCAGTGTCTTGTGACTAGTGAAAGTTAACTGGATGCCTCGGTGCTCTTCGTTTACG
TACTGGTGACAGATGCGCTTGTATTGTTCGTGTTGCTCAGGCATTAGTTTAAAACAGGTTCTAAGTTCGTTATCCAG
CCTGTACTTCTCCATCAGCAGACACATCACTTCCATGCCTTTCTCCCAAGCAGACACCAGGGGCAAGCTAATCGGAT
TCTTAACAGTGCAGGCAGCAGCTCCTTTAGCCAGAGGGTCATCTTTAGCGATCTTCTCAATGCTTCTTTTGCCATCC
TTCTCAACGATGCGCACGGGCGGGTAGCTGAAACCCACTGCTACAAGTTGCGCCTCTTCTCTTTCTTCTTCGCTGTC
TTGACTGATGTCTTGCATGGGGATATGTTTGGTCTTCCTTGGCTTCTTTTTGGGGGGTATCGGAGGAGGAGGACTGT
CGCTCCGTTCCGGAGACAGGGAGGATTGTGACGTTTCGCTCACCATTACCAACTGACTGTCGGTAGAAGAACCTGAC
CCCACACGGCGACAGGTGTTTTTCTTCGGGGGCAGAGGTGGAGGCGATTGCGAAGGGCTGCGGTCCGACCTGGAAGG
CGGATGACTGGCAGAACCCCTTCCGCGTTCGGGGGTGTGCTCCCTGTGGCGGTCGCTTAACTGATTTCCTTCGCGGC
TGGCCATTGTGTTCTCCTAGGCAGAGAAACAACAGACATGGAAACTCAGCCATTGCTGTCAACATCGCCACGAGTGC
CATCACATCTCGTCCTCAGCGACGAGGAAAAGGAGCAGAGCTTAAGCATTCCACCGCCCAGTCCTGCCACCACCTCT
ACCCTAGAAGATAAGGAGGTCGACGCATCTCATGACATGCAGAATAAAAAAGCGAAAGAGTCTGAGACAGACATCGA
GCAAGACCCGGGCTATGTGACACCGGTGGAACACGAGGAAGAGTTGAAACGCTTTCTAGAGAGAGAGGATGAAAACT
GCCCAAAACAGCGAGCAGATAACTATCACCAAGATGCTGGAAATAGGGATCAGAACACCGACTACCTCATAGGGCTT
GACGGGGAAGACGCGCTCCTTAAACATCTAGCAAGACAGTCGCTCATAGTCAAGGATGCATTATTGGACAGAACTGA
AGTGCCCATCAGTGTGGAAGAGCTCAGCTGCGCCTACGAGCTTAACCTTTTTTCACCTCGTACTCCCCCCAAACGTC
AGCCAAACGGCACCTGCGAGCCAAATCCTCGCTTAAACTTTTATCCAGCTTTTGCTGTGCCAGAAGTACTGGCTACC
TATCACATCTTTTTTAAAAATCAAAAAATTCCAGTCTCCTGCCGCGCTAATCGCACCCGCGCCGATGCCCTACTCAA
TCTGGGACCTGGTTCACGCTTACCTGATATAGCTTCCTTGGAAGAGGTTCCAAAGATCTTCGAGGGTCTGGGCAATA
ATGAGACTCGGGCCGCAAATGCTCTGCAAAAGGGAGAAAATGGCATGGATGAGCATCACAGCGTTCTGGTGGAATTG
GAAGGCGATAATGCCAGACTCGCAGTACTCAAGCGAAGCGTCGAGGTCACACACTTCGCATATCCCGCTGTCAACCT
GCCCCCTAAAGTCATGACGGCGGTCATGGACCAGTTACTCATTAAGCGCGCAAGTCCCCTTTCAGAAGACATGCATG
ACCCAGATGCCTGTGATGAGGGTAAACCAGTGGTCAGTGATGAGCAGCTAACCCGATGGCTGGGCACCGACTCTCCC
CGGGATTTGGAAGAGCGTCGCAAGCTTATGATGGCCGTGGTGCTGGTTACCGTAGAACTAGAGTGTCTCCGACGTTT
CTTTACCGATTCAGAAACCTTGCGCAAACTCGAAGAGAATCTGCACTACACTTTTAGACACGGCTTTGTGCGGCAGG
CATGCAAGATATCTAACGTGGAACTCACCAACCTGGTTTCCTACATGGGTATTCTGCATGAGAATCGCCTAGGACAA
AGCGTGCTGCACAGCACCCTTAAGGGGGAAGCCCGCCGTGATTACATCCGCGATTGTGTCTATCTCTACCTGTGCCA
CACGTGGCAAACCGGCATGGGTGTATGGCAGCAATGTTTAGAAGAACAGAACTTGAAAGAGCTTGACAAGCTCTTAC
AGAAATCTCTTAAGGTTCTGTGGACAGGGTTCGACGAGCGCACCGTCGCTTCCGACCTGGCAGACCTCATCTTCCCA
GAGCGTCTCAGGGTTACTTTGCGAAACGGATTGCCTGACTTTATGAGCCAGAGCATGCTTAACAATTTTCGCTCTTT
CATCCTGGAACGCTCCGGTATCCTGCCCGCCACCTGCTGCGCACTGCCCTCCGACTTTGTGCCTCTCACCTACCGCG
AGTGCCCCCCGCCGCTATGGAGTCACTGCTACCTGTTCCGTCTGGCCAACTATCTCTCCTACCACTCGGATGTGATC
GAGGATGTGAGCGGAGACGGCTTGCTGGAGTGCCACTGCCGCTGCAATCTGTGCACGCCCCACCGGTCCCTAGCTTG
CAACCCCCAGTTGATGAGCGAAACCCAGATAATAGGCACCTTTGAATTGCAAGGCCCCAGCAGCCAAGGCGATGGGT
CTTCTCCTGGGCAAAGTTTAAAACTGACCCCGGGACTGTGGACCTCCGCCTACTTGCGCAAGTTTGCTCCGGAAGAT
TACCACCCCTATGAAATCAAGTTCTATGAGGACCAATCACAGCCTCCAAAGGCCGAACTTTCGGCTTGCGTCATCAC
CCAGGGGGCAATTCTGGCCCAATTGCAAGCCATCCAAAAATCCCGCCAAGAATTTCTACTGAAAAAGGGTAAGGGGG
TCTACCTTGACCCCCAGACCGGCGAGGAACTCAACACAAGGTTCCCTCAGGATGTCCCAACGACGAGAAAACAAGAA
GTTGAAGGTGCAGCCGCCGCCCCCAGAAGATATGGAGGAAGATTGGGACAGTCAGGCAGAGGAGGCGGAGGAGGACA
GTCTGGAGGACAGTCTGGAGGAAGACAGTTTGGAGGAGGAAAACGAGGAGGCAGAGGAGGTGGAAGAAGTAACCGCC
GACAAACAGTTATCCTCGGCTGCGGAGACAAGCAACAGCGCTACCATCTCCGCTCCGAGTCGAGGAACCCGGCGGCG
TCCCAGCAGTAGATGGGACGAGACCGGACGCTTCCCGAACCCAACCAGCGCTTCCAAGACCGGTAAGAAGGATCGGC
AGGGATACAAGTCCTGGCGGGGGCATAAGAATGCCATCATCTCCTGCTTGCATGAGTGCGGGGGCAACATATCCTTC
ACGCGGCGCTACTTGCTATTCCACCATGGGGTGAACTTTCCGCGCAATGTTTTGCATTACTACCGTCACCTCCACAG
CCCCTACTATAGCCAGCAAATCCCGACAGTCTCGACAGATAAAGACAGCGGCGGCGACCTCCAACAGAAAACCAGCA
GCGGCAGTTAGAAAATACACAACAAGTGCAGCAACAGGAGGATTAAAGATTACAGCCAACGAGCCAGCGCAAACCCG
AGAGTTAAGAAATCGGATCTTTCCAACCCTGTATGCCATCTTCCAGCAGAGTCGGGGTCAAGAGCAGGAACTGAAAA
TAAAAAACCGATCTCTGCGTTCGCTCACCAGAAGTTGTTTGTATCACAAGAGCGAAGATCAACTTCAGCGCACTCTC
GAGGACGCCGAGGCTCTCTTCAACAAGTACTGCGCGCTGACTCTTAAAGAGTAGGCAGCGACCGCGCTTATTCAAAA
AAGGCGGGAATTACATCATCCTCGACATGAGTAAAGAAATTCCCACGCCTTACATGTGGAGTTATCAACCCCAAATG
GGATTGGCAGCAGGCGCCTCCCAGGACTACTCCACCCGCATGAATTGGCTCAGCGCCGGGCCTTCTATGATTTCTCG
AGTTAATGATATACGCGCCTACCGAAACCAAATACTTTTGGAACAGTCAGCTCTTACCACCACGCCCCGCCAACACC
TTAATCCCAGAAATTGGCCCGCCGCCCTAGTGTACCAGGAAAGTCCCGCTCCCACCACTGTATTACTTCCTCGAGAC
GCCCAGGCCGAAGTCCAAATGACTAATGCAGGTGCGCAGTTAGCTGGCGGCTCCACCCTATGTCGTCACAGGCCTCG
GCATAATATAAAACGCCTGATGATCAGAGGCCGAGGTATCCAGCTCAACGACGAGTCGGTGAGCTCTCCGCTTGGTC
TACGACCAGACGGAATCTTTCAGATTGCCGGCTGCGGGAGATCTTCCTTCACCCCTCGTCAGGCTGTTCTGACTTTG
GAAAGTTCGTCTTCGCAACCCCGCTCGGGCGGAATCGGGACCGTTCAATTTGTAGAGGAGTTTACTCCCTCTGTCTA
CTTCAACCCCTTCTCCGGATCTCCTGGGCACTACCCGGACGAGTTCATACCGAACTTCGACGCGATTAGCGAGTCAG
TGGACGGCTACGATTGATGTCTGGTGACGCGGCTGAGCTATCTCGGCTGCGACATCTAGACCACTGCCGCCGCTTTC
GCTGCTTTGCCCGGGAACTTATTGAGTTCATCTACTTCGAACTCCCCAAGGATCACCCTCAAGGTCCGGCCCACGGA
GTGCGGATTACTATCGAAGGCAAAATAGACTCTCGCCTGCAACGAATTTTCTCCCAGCGGCCCGTGCTGATCGAGCG
AGACCAGGGAAACACCACGGTTTCCATCTACTGCATTTGTAATCACCCCGGATTGCATGAAAGCCTTTGCTGTCTTA
TGTGTACTGAGTTTAATAAAAACTGAATTAAGACTCTCCTACGGACTGCCGCTTCTTCAACCCGGATTTTACAACCA
GAAGAACAAAACTTTTCCTGTCGTCCAGGACTCTGTTAACTTCACCTTTCCTACTCACAAACTAGAAGCTCAACGAC
TACACCGCTTTTCCAGAAGCATTTTCCCTACTAATACTACTTTCAAAACCGGAGGTGAGCTCCACGGTCTCCCTACA
GAAAACCCTTGGGTGGAAGCGGGCCTTGTAGTACTAGGAATTCTTGCGGGTGGGCTTGTGATTATTCTTTGCTACCT
ATACACACCTTGCTTCACTTTCCTAGTGGTGTTGTGGTATTGGTTTAAAAAATGGGGCCCATACTAGTCTTGCTTGT
TTTACTTTCGCTTTTGGAACCGGGTTCTGCCAATTACGATCCATGTCTAGACTTTGACCCAGAAAACTGCACACTTA
CTTTTGCACCCGACACAAGCCGCATCTGTGGAGTTCTTATTAAGTGCGGATGGGAATGCAGGTCCGTTGAAATTACA
CACAATAACAAAACCTGGAACAATACCTTATCCACCACATGGGAGCCAGGAGTTCCCGAGTGGTACACTGTCTCTGT
CCGAGGTCCTGACGGTTCCATCCGCATTAGTAACAACACTTTCATTTTTTCTGAAATGTGCGATCTGGCCATGTTCA
TGAGCAAACAGTATTCTCTATGGCCTCCTAGCAAGGACAACATCGTAACGTTCTCCATTGCTTATTGCTTGTGCGCT
TGCCTTCTTACTGCTTTACTGTGCGTATGCATACACCTGCTTGTAACCACTCGCATCAAAAACGCCAATAACAAAGA
AAAAATGCCTTAACCTCTTTCTGTTTACAGACATGGCTTCTCTTACATCTCTCATATTTGTCAGCATTGTCACTGCC
GCTCACGGACAAACAGTCGTCTCTATCCCACTAGGACATAATTACACTCTCATAGGACCCCCAATCACTTCAGAGGT
CATCTGGACCAAACTGGGAAGCGTTGATTACTTTGATATAATCTGTAACAAAACAAAACCAATAATAGTAACTTGCA
ACATACAAAATCTTACATTGATTAATGTTAGCAAAGTTTACAGCGGTTACTATTATGGTTATGACAGATACAGTAGT
CAATATAGAAATTACTTGGTTCGTGTTACCCAGTTGAAAACCACGAAAATGCCAAATATGGCAAAGATTCGATCCGA
TGACAATTCTCTAGAAACTTTTACATCTCCCACCACACCCGACGAAAAAAACATCCCAGATTCAATGATTGCAATTG
TTGCAGCGGTGGCAGTGGTGATGGCACTAATAATAATATGCATGCTTTTATATGCTTGTCGCTACAAAAAGTTTCAT
CCTAAAAAACAAGATCTCCTACTAAGGCTTAACATTTAATTTCTTTTTATACAGCCATGGTTTCCACTACCACATTC
CTTATGCTTACTAGTCTCGCAACTCTGACTTCTGCTCGCTCACACCTCACTGTAACTATAGGCTCAAACTGCACACT
AAAAGGACCTCAAGGTGGTCATGTCTTTTGGTGGAGAATATATGACAATGGATGGTTTACAAAACCATGTGACCAAC
CTGGTAGATTTTTCTGCAACGGCAGAGACCTAACCATTATCAACGTGACAGCAAATGACAAAGGCTTCTATTATGGA
ACCGACTATAAAAGTAGTTTAGATTATAACATTATTGTACTGCCATCTACCACTCCACCACCCCGCACAACTACTTT
CTCTAGCAGCAGTGTCGCTAACAATACAATTTCCAATCCAACCTTTGCCGCGCTTTTAAAACGCACTGTGAATAATT
CTACAACTTCACATACAACAATTTCCACTTCAACAATCAGCATCATCGCTGCAGTGACAATTGGAATATCTATTCTT
GTTTTTACCATAACCTACTACGCCTGCTGCTATAGAAAAGACAAACATAAAGGTGATCCATTACTTAGATTTGATAT
TTAATTTGTTCTTTTTTTTTATTTACAGTATGGTGAACACCAATCATGGTACCTAGAAATTTCTTCTTCACCATACT
CATCTGTGCTTTTAATGTTTGCGCTACTTTCACAGCAGTAGCCACAGCAACCCCAGACTGTATAGGAGCATTTGCTT
CCTATGCACTTTTTGCTTTTGTTACTTGCATCTGCGTATGTAGCATAGTCTGCCTGGTTATTAATTTTTTCCAACTT
CTAGACTGGATCCTTGTGCGAATTGCCTACCTGCGCCACCATCCCGAATACCGCAACCAAAATATCGCGGCACTTCT
TAGACTCATCTAAAACCATGCAGGCTATACTACCAATATTTTTGCTTCTATTGCTTCCCTACGCTGTCTCAACCCCA
GCTGCCTATAGTACTCCACCAGAACACCTTAGAAAATGCAAATTCCAACAACCGTGGTCATTTCTTGCTTGCTATCG
AGAAAAATCAGAAATCCCCCCAAATTTAATAATGATTGCTGGAATAATTAATATAATCTGTTGCACCATAATTTCAT
TTTTGATATACCCCCTATTTGATTTTGGCTGGAATGCTCCCAATGCACATGATCATCCACAAGACCCAGAGGAACAC
ATTCCCCCACAAAACATGCAACATCCAATAGCGCTAATAGATTACGAAAGTGAACCACAACCCCCACTACTCCCTGC
TATTAGTTACTTCAACCTAACCGGCGGAGATGACTGAAACACTCACCACCTCCAATTCCGCCGAGGATCTGCTCGAT
ATGGACGGCCGCGTCTCAGAACAACGACTTGCCCAACTACGCATCCGCCAGCAGCAGGAACGCGTGGCCAAAGAGCT
CAGAGATGTCATCCAAATTCACCAATGCAAAAAAGGCATATTCTGTTTGGTAAAACAAGCCAAGATATCCTACGAGA
TCACCGCTACTGACCATCGCCTCTCTTACGAACTTGGCCCCCAACGACAAAAATTTACCTGCATGGTGGGAATCAAC
CCCATAGTTATCACCCAACAAAGTGGAGATACTAAGGGTTGCATTCACTGTTCCTGCGATTCCATCGAGTGCACCTA
CACCCTGCTGAAGACCCTATGCGGCCTAAGAGACCTGCTACCAATGAATTAAAAAAAAATGATTAATAAAAAATCAC
TTACTTGAAATCAGCAATAAGGTCTCTGTTGAAATTTTCTCCCAGCAGCACCTCACTTCCCTCTTCCCAACTCTGGT
ATTCTAAACCCCGTTCAGCGGCATACTTTCTCCATACTTTAAAGGGGATGTCAAATTTTAGCTCCTCTCCTGTACCC
ACAATCTTCATGTCTTTCTTCCCAGATGACCAAGAGAGTCCGGCTCAGTGACTCCTTCAACCCTGTCTACCCCTATG
AAGATGAAAGCACCTCCCAACACCCCTTTTATAACCCAGGGTTTATTTCCCCAAATGGCTTCACACAAAGCCCAGAC
GGAGTTCTTACTTTAAAATGTTTAACCCCACTAACAACCACAGGCGGATCTCTACAGCTAAAAGTGGGAGGGGGACT
TACAGTGGATGACACTGATGGTACCTTACAAGAAAACATACGTGCTACAGCACCCATTACTAAAAATAATCACTCTG
TAGAACTATCCATTGGAAATGGATTAGAAACTCAAAACAATAAACTATGTGCCAAATTGGGAAATGGGTTAAAATTT
AACAACGGTGACATTTGTATAAAGGATAGTATTAACACCTTATGGACTGGAATAAACCCTCCACCTAACTGTCAAAT
TGTGGAAAACACTAATACAAATGATGGCAAACTTACTTTAGTATTAGTAAAAAATGGAGGGCTTGTTAATGGCTACG
TGTCTCTAGTTGGTGTATCAGACACTGTGAACCAAATGTTCACACAAAAGACAGCAAACATCCAATTAAGATTATAT
TTTGACTCTTCTGGAAATCTATTAACTGAGGAATCAGACTTAAAAATTCCACTTAAAAATAAATCTTCTACAGCGAC
CAGTGAAACTGTAGCCAGCAGCAAAGCCTTTATGCCAAGTACTACAGCTTATCCCTTCAACACCACTACTAGGGATA
GTGAAAACTACATTCATGGAATATGTTACTACATGACTAGTTATGATAGAAGTCTATTTCCCTTGAACATTTCTATA
ATGCTAAACAGCCGTATGATTTCTTCCAATGTTGCCTATGCCATACAATTTGAATGGAATCTAAATGCAAGTGAATC
TCCAGAAAGCAACATAGCTACGCTGACCACATCCCCCTTTTTCTTTTCTTACATTACAGAAGACGACAACTAAAATA
AAGTTTAAGTGTTTTTATTTAAAATCACAAAATTCGAGTAGTTATTTTGCCTCCACCTTCCCATTTGACAGAATACA
CCAATCTCTCCCCACGCACAGCTGTTAAACATTTGGATACCATTAGAGATAGACATTGTTTTAGATTCCACATTCCA
AACAGTTTCAGAGCGAGCCAATCTGGGGTCAGTGATAGATAAAAATCCATCGCGATAGTCTTTTAAAGCGCTTTCAC
AGTCCAACTGCTGCGGATGCGACTCCGGAGTTTGGATCACGGTCATCTGGAAGAAGAACGATGGGAATCATAATCCG
AAAACGGTATCGGACGATTGTGTCTCATCAAACCCACAAGCAGCCGCTGTCTGCGTCGCTCCGTGCGACTGCTGTTT
ATGGGATCAGGGTCCACAGTTTCCTGAAGCATGATTTTAATAGCCCTTAACATCAACTTTCTGGTGCGATGCGCGCA
GCAACGCATTCTGATTTCACTCAAATCTTTGCAGTAGGTACAACACATTATTACAATATTGTTTAATAAACCATAAT
TAAAAGCGCTCCAGCCAAAACTCATATCTGATATAATCGCCCCTGCATGACCATCATACCAAAGTTTAATATAAATT
AAATGACGTTCCCTCAAAAACACACTACCCACATACATGATCTCTTTTGGCATGTGCATATTAACAATCTGTCTGTA
CCATGGACAACGTTGGTTAATCATGCAACCCAATATAACCTTCCGGAACCACACTGCCAACACCGCTCCCCCAGCCA
TGCATTGAAGTGAACCCTGCTGATTACAATGACAATGAAGAACCCAATTCTCTCGACCGTGAATCACTTGAGAATGA
AAAATATCTATAGTGGCACAACATAGACATAAATGCATGCATCTTCTCATAATTTTTAACTCCTCAGGATTTAGAAA
CATATCCCAGGGAATAGGAAGCTCTTGCAGAACAGTAAAGCTGGCAGAACAAGGAAGACCACGAACACAACTTACAC
TATGCATAGTCATAGTATCACAATCTGGCAACAGCGGGTGGTCTTCAGTCATAGAAGCTCGGGTTTCATTTTCCTCA
CAACGTGGTAACTGGGCTCTGGTGTAAGGGTGATGTCTGGCGCATGATGTCGAGCGTGCGCGCAACCTTGTCATAAT
GGAGTTGCTTCCTGACATTCTCGTATTTTGTATAGCAAAACGCGGCCCTGGCAGAACACACTCTTCTTCGCCTTCTA
TCCTGCCGCTTAGCGTGTTCCGTGTGATAGTTCAAGTACAGCCACACTCTTAAGTTGGTCAAAAGAATGCTGGCTTC
AGTTGTAATCAAAACTCCATCGCATCTAATTGTTCTGAGGAAATCATCCACGGTAGCATATGCAAATCCCAACCAAG
CAATGCAACTGGATTGCGTTTCAAGCAGGAGAGGAGAGGGAAGAGACGGAAGAACCATGTTAATTTTTATTCCAAAC
GATCTCGCAGTACTTCAAATTGTAGATCGCGCAGATGGCATCTCTCGCCCCCACTGTGTTGGTGAAAAAGCACAGCT
AAATCAAAAGAAATGCGATTTTCAAGGTGCTCAACGGTGGCTTCCAACAAAGCCTCCACGCGCACATCCAAGAACAA
AAGAATACCAAAAGAAGGAGCATTTTCTAACTCCTCAATCATCATATTACATTCCTGCACCATTCCCAGATAATTTT
CAGCTTTCCAGCCTTGAATTATTCGTGTCAGTTCTTGTGGTAAATCCAATCCACACATTACAAACAGGTCCCGGAGG
GCGCCCTCCACCACCATTCTTAAACACACCCTCATAATGACAAAATATCTTGCTCCTGTGTCACCTGTAGCGAATTG
AGAATGGCAACATCAATTGACATGCCCTTGGCTCTAAGTTCTTCTTTAAGTTCTAGTTGTAAAAACTCTCTCATATT
ATCACCAAACTGCTTAGCCAGAAGCCCCCCGGGAACAAGAGCAGGGGACGCTACAGTGCAGTACAAGCGCAGACCTC
CCCAATTGGCTCCAGCAAAAACAAGATTGGAATAAGCATATTGGGAACCACCAGTAATATCATCGAAGTTGCTGGAA
ATATAATCAGGCAGAGTTTCTTGTAGAAATTGAATAAAAGAAAAATTTGCCAAAAAAACATTCAAAACCTCTGGGAT
GCAAATGCAATAGGTTACCGCGCTGCGCTCCAACATTGTTAGTTTTGAATTAGTCTGCAAAAATAAAAAAAAAACAA
GCGTCATATCATAGTAGCCTGACGAACAGGTGGATAAATCAGTCTTTCCATCACAAGACAAGCCACAGGGTCTCCAG
CTCGACCCTCGTAAAACCTGTCATCGTGATTAAACAACAGCACCGAAAGTTCCTCGCGGTGACCAGCATGAATAAGT
CTTGATGAAGCATACAATCCAGACATGTTAGCATCAGTTAAGGAGAAAAAACAGCCAACATAGCCTTTGGGTATAAT
TATGCTTAATCGTAAGTATAGCAAAGCCACCCCTCGCGGATACAAAGTAAAAGGCACAGGAGAATAAAAAATATAAT
TATTTCTCTGCTGCTGTTTAGGCAACGTCGCCCCCGGTCCCTCTAAATACACATACAAAGCCTCATCAGCCATGGCT
TACCAGAGAAAGTACAGCGGGCACACAAACCACAAGCTCTAAAGTCACTCTCCAACCTCTCCACAATATATATACAC
AAGCCCTAAACTGACGTAATGGGACTAAAGTGTAAAAAATCCCGCCAAACCCAACACACACCCCGAAACTGCGTCAC
CAGGGAAAAGTACAGTTTCACTTCCGCAATCCCAACAAGCGTCACTTCCTCTTTCTCACGGTACGTCACATCCCATT
AACTTACAACGTCATTTTCCCACGGCCGCGCCGCCCCTTTTAACCGTTAACCCCACAGCCAATCACCACACGGCCCA
CACTTTTTAAAATCACCTCATTTACATATTGGCACCATTCCATCTATAAGGTATATTATTGATGATG

GenBank Accession No. AP 000580 (SEQ ID NO: 244)

MRRVVLGGAVVYPEGPPPSYESVMQQQQATAVMQSPLEAPFVPPRYLAP
TEGRNSIRYSELAPQYDTTRLYLVDNKSADIASLNYQNDHSNFLTTVVQ
NNDFTPTEASTQTINFDERSRWGGQLKTIMHTNMPNVNEYMFSNKFKAR
VMVSRKPPDGAAVGDTYDHKQDILEYEWFEFTLPEGNFSVTMTIDLMNN
AIIDNYLKVGRQNGVLESDIGVKFDTRNFKLGWDPETKLIMPGVYTYEA
FHPDIVLLPGCGVDFTESRLSNLLGIRKKQPFQEGFKILYEDLEGGNIP
ALLDVDAYENSKKEQKAKIEAATAAAEAKANIVASDSTRVANAGEVRGD
NFAPTPVPTAESLLADVSEGTDVKLTIQPVEKDSKNRSYNVLEDKINTA
YRSWYLSYNYGDPEKGVRSWTLLTTSDVTCGAEQVYWSLPDMMKDPVTF
RSTRQVSNYPVVGAELMPVFSKSFYNEQAVYSQQLRQSTSLTHVFNRFP
ENQILIRPPAPTITTVSENVPALTDHGTLPLRSSIRGVQRVTVTDARRR
TCPYVYKALGIVAPRVLSSRTF

GenBank Accession No. AP_000585 (SEQ ID NO: 245)

MATPSMLPQWAYMHIAGQDASEYLSPGLVQFARATDTYFNLGNKFRNPT
VAPTHDVTTDRSQRLMLRFVPVDREDNTYSYKVRYTLAVGDNRVLDMAS
TFFDIRGVLDRGPSFKPYSGTAYNSLAPKGAPNASQWIAKGVPTAAAAG
NGEEEHETEEKTATYTFANAPVKAEAQITKEGLPIGLEISAENESKPIY
ADKLYQPEPQVGDETWTDLDGKTEEYGGRALKPTTNMKPCYGSYAKPTN
LKGGQAKPKNSEPSSEKIEYDIDMEFFDNSSQRTNFSPKIVMYAENVGL
ETPDTHVVYKPGTEDTSSEANLGQQSMPNRPNYIGFRDNFIGLMYYNST
GNMGVLAGQASQLNAVVDLQDRNTELSYQLLLDSLGDRTRYFSMWNQAV
DSYDPDVRVIENHGVEDELPNYCFPLDGIGVPTTSYKSIVPNGEDNNNW
KEPEVNGTSEIGQGNLFAMEINLQANLWRSFLYSNVALYLPDSYKYTPS
NVTLPENKNTYDYMNGRVVPPSLVDTYVNIGARWSLDAMDNVNPFNHHR
NAGLRYRSMLLGNGRYVPFHIQVPQKFFAVKNLLLLPGSYTYEWNFRKD
VNMVLQSSLGNDLRVDGASISFTSINLYATFFPMAHNTASTLEAMLRND
TNDQSFNDYLSAANMLYPIPANATNIPISIPSRNWAAFRGWSFTRLKTK
ETPSLGSGFDPYFVYSGSIPYLDGTFYLNHTFKKVSIMFDSSVSWPGND
RLLSPNEFEIKRTVDGEGYNVAQCNMTKDWFLVQMLANYNIGYQGFYIP
EGYKDRMYSFFRNFQPMSRQVVDEVNYKDFKAVAIPYQHNNSGFVGYMA
PTMRQGQPYPANYPYPLIGTTAVNSVTQKKFLCDRTMWRIPFSSNFMSM
GALTDLGQNMLYANSAHALDMTFEVDPMDEPTLLYLLFEVFDVVRVHQP
HRGIIEAVYLRTPFSAGNATT

GenBank Accession No. Z84721 (SEQ ID NO: 246)

GATCACGCCATTGCACTCCACCCTGGGCGACAGAGCGACGAGACCCCGTATCAAAAAAAAAAAAAAGAAAGAAAGAA
AGAAAAAAGAAAAAAAAAAGGCCGGGCGCGGTGGCTCACGCCTGTAATCCCAGCACTTTGGGAGGCCGAGGCGGGTG
AATCACGAGGTCAGGAGTTCGAGACCATCCTGGCCAACATGGTGAAACCCCGTCTCTACAAAAAAAAAAAAAAAAAT
TAGCCGGGCGTGGTGGCGGGCGCCTGTAATCCCAGCTACTCGGGAGGCTGAGACAGGAAAATCGCTTGAACCCGGGA
GGCGGAGCTTGCGGTGAGCCGAGATTGCGCCACTGCACTACAGCCTAGGCGACAGAGCGAGACTCCGTCTCAAAAAA
AAAAAAAAAAAAAAAAAACACTTGGAAGCCGACAGGAGATCTTTGAGACCTTGGGCGAGGCAGTGACACTAAAGGCA
GGAGCGACTACAGAAGAATAAATTAAACTTCATCAGATTAAAAACTTTACTGCGGCCGGGCGCGGTGGCTCACGCCT
GAAATCCCAGCACTTTGGGAGGCCGAGGTGGGCAGATCATGAGATCAGGAGATCTAGACCATCCTGGCCAACATGGT
AAAACCCCGTCTCTCTACTAAAAATACAAAAATTAGCTGGGTTTGGCGGCGCCTGCTTCTAATCCCAGCTACTCGGG
AGGCTGAGGCAGGAGAATCGCTTGAAGCCGGGAGGCGGAGGTTGCAGTGAGCCGAGATCGTGCCACTGAACTCTGGC
CTGGCGACAGAGCGAGACTCCATCTCAAAACAAAACAAAAACTTCGGTGCTTTAAAGGACACCATCAAGAAAATTAA
AAGTCCACCCACAGAACGGGAGAAAATATTTGTAAGTTACATATCTGATAAGGGAATTGTATCTAGAATGGAGGAAA
CTTACAACTCAACAATAAAAAGACAATTGAAAAATGCACAAAGGATATGAATATTTTTCCAGTGCATTATGCAAATG
GCCAATAAGCACCAGAAGATGCTCAGCTCAACTGGTAGAGGCTTACGCCTGTGACCCCAGCGCTGAGAGGCCAGGAA
CTCCAGACCAGCCTGGGCAAAACAGAAATTAAAAATGCTCAACATTATTAGGCATTAGGGAGATGCAAATCAAAACT
ACAAATAGATGCCACATCACACCTCCTACGATGGCTGTAATCAAAAAGACAAGCGTCAGCAGGGGTGTGGAGAAACG
GGAATCTCTCTCCTGCTGGTGGGAATGTAAGAGGCTACACTCGCTATGGAAAACAGGCTGGCAGTTCCTGAAAGGTT
AGAGTTAACACAACACTCGGCAAATCCCCCTTTTAGATATATAGCCAAGAGAAATGAAAGCATATGTCCACACAAAA
ACATGTGTGTTCTTAGTAATATTATTCATAATAGCCCAAAGTGGAAGCAATCCTAGGGTATATCAATTGATGAATGG
GTGAATATGGTATAGTTTGTTTAAGGGAATACTATTCAGCCATAAAAAGGAATGAAGTACGGCACATGAATCCATCT
TGAAGACACACTAATATATGATTCCATTTATATAAGATGCCCAGAATAGGCAAATCCATAGAGACAGAATGATTAGT
GGCTGCCTAGGGCTTCCAGGGGGTCAGGGGAAATATGGAGCGATTCATGGGTTTTTTGAAGGGGAGTGATGAAAATG
TTCTAACGTTGACTGTGGTAATGGTTGGACAGCTCTGAGAACGCGAATACACTAAAAGACATGGAAGTGCCGGGCGC
AGTGGCTCATGCCTGTAATCCCAGCGCTTTGGGAGGCCAAGGCAGGCGGATCGCGAGGTCAGGAGATCGAGACCATC
CTGGCTAAGACAGTGAAACCCCGTGTCTACTAAAAATACAAAAAATTAGCTGGACATGGTGCGGGCGCCTGTAGTCC
CAGATACTCAGGAGGCTGAGGCAGGAGAATGGTGTGAACCCGGGAGGCGGAGCTTGCAGTGAGCCAAGATCGCACCA
TTGCACTCCAGCCTGGGCGACAGAGCGAGACTCCATCTCAAAAACAAAAAAAAGATATGGAAGTGTACACTTGAAGT
GGATAAGCTTTATGGTATGCAAATTGGTATGGTATGGTAAATTATATCTCAATGAAGTTGTTTTTTAAAAAATCACC
CCACCTACCCTATCCCAGGCTTCCCCAGGAGGTAACTAAAGGTAATGAGCTTCTTTGGCTGCTTCCAGAACTTTCCC
AAGCACATCAAATGCATCAGAACCTAACCACTTGACTGAGGGATGAGCATTTTCACTGTTGCAAGTAACCCTCTTGC
ACCAACACTGACACTAATGTGTATTTTGCAGAACAAATTTGTGGATTGGCCTCACCAGGGTGAAGGGTACGTGCATT
TGAAATGGCTCAACAGTACCAACAGGTGCGTTTTCTTGCACAGGGCTGCATAACATTTTTTTTTTTTTTTTGAGACA
GAGTCTCGCTCTATCACCCAGGCTGGAGGGCAGTGGCACAATCTCAGTTCACTGCAAGCTCCACCTACCAGGTTCAC
ATCATTCTCCTGCCTCAGCCTCCCAAGTAGCTGGGACTACAGGTGCCCGCCACCACACCAGGCTAATTTTTTTTTTT
TTTTTGAGATGGAGTCTTGCTCTGTCGCCCAGGCTGGAGTGCAGTGGCACGATCTCAGCTCACTGCAAGCTCCACCT
CCCAGGTTCACACCATTCTCCTGCCTCAGCCTCCCCAGTAGCTGAGACTACAGGCGCCCGCCACCACGTCCGGCTAA
TTTTTTTGTATTTTTAGTAGAGACGGGGTTTCACCGCGTTAGCCAGGATGGTCTCGATCTCCTGACCTCTTGATCCA
CCCGCCTCGGCCTCTCAAAGTGCTGGGATTACAGGCGTGAGCCACCGTGCCCGGCCTGCATAACATTTTTTTTTTTC
CTGAAATTCCCAGAAAGGAAAATGGTGTCTTGTTCTATGTTGCATTTCTTTGATTGAGAGGGAGAGCTGCATCACTT
AATTATTTGCAGAGAATTGCTTTTCTTGTTTTCTTTACAGGTGGTCTGTTCTTGGATGGTCTGGCTGTGTTCTTTCT
GAGGAATACATAACCTCTGCTACACATTTTGCAAGGCTTTATCCCCGTTGTCCATGTTTTGATTTTATGTATAATCA
AAAGGTTTGTGAGTTCTCCCGCACTTCCCAGGAGTGCCTCTGGGATGGAAATGAGACTGCAGGAGCAGGGCTTGAGG
CTGGAGGGGTGAGATGGGACAGATGGGGGTGGGGGAACCCAGGGCAGTGGCCGGTGGTGGTAATGGAGGCCTCCTCA
CAGGGACCCTCACAGCGACCATGCGAATGGAGCAGGACTGTGACTCAGGTCTCGCTCTTCTGACCTAATCGTGCTGC
TGCCCCAATGGGCAGAACCTTGGGGCTCCAGACTGGACATCTCTGGGCTCAAAGGATCCCACTGTTCCCCCGGTTAC
CCTCTCAGGGTTGGCCTCCTGCCAGTAACCCTGGCACTCATTGTTCATTCTTCTGACTATCGTCAGTCATAATGAGA
GCTCGAACTGGTGAAAGTGCAGGGAGCTCACCATGACCCCAGCCCACAGAGGTCCTGGGTGCGTCCCTGCCCTCGAA
GCAGCACTCTGGATCCCAGCGCCACCCTCATGTCCATGTTTGCACCTCATTGGCTGTGACAGAAATGAGACATCATT
GTCACACGCTGGCCTGAGGGTCAGTGGGCCTTGCTTTGGACCTCAGTTTCCCCACCAGTAACAGGGTTCAGAGCAGA
TGGTCCCTGAGTGAGTCCCAGCTCTAAGTTCTCCCAGGGTCTCCTGGACAATGAAGCACCAGGGCCAACCTCCATTT
GCTACAGGGGACATCCTCAGGCTCTTCTCTGCTAAGACCCCACACCTCCAAGTCTCCTCATTTTACCTTTAAATAGC
TGTTTCATGACCTGCTTTTTTGACGGTAAGTAGATTTTTGGAAACTGAAACCCCTGACCCTTCCTCCCAGCCTGGGC
CTGCCCTTGGCAGGATAGGAGGCCTTATCGGTCCTGCCACTTGGTCTGGGCCTCAAAGGGCCACCGCCATCTGCAGG
AGGGCCGGGTGGGGTTCACAGACGCTATCTGGGACTTGCCTGGACACCTCCACCTTCTCAGCTGAGTGTTGCTGCCC
CACCAGGGAGAACCACTCACACACAGTAGTAATAGAAATAATTTAAAATTCATGCTGCAAGTTCCTGAGCGCCCTCC
CAACACTGAGGTGGGGGCTAGTCTAATCCCCATCCTAGAGGTGAAAACAGTGAAACTAGGACTCACAAGGCAAATTA
GCCTGTTCAGGGTCACCGAGGGTCCACTCTCATGGGAGAGTTTGCAGATGCCCAATCCGGCATTCTGCTGAGTGTCC
AGTGGCTTGTAAGTGGCCAGACACCCTTTGAGCTCAGCCTCAGCTGCTCAGGCACAGAACGTGCCTGGAGCTTGGAA
TTCAGGCCAGAAACCACCAGTGGACACCAGCATTCCACACTCACTGCACAGGCTGGGGCTCAAACCAAGGCCCAGGG
ACAGGAAGGGACAAGCCCCAGCCCCAGCCGGACTCCCAGCCCACACAAACCATCAGGGCTTGTTTCCTGCTCCATGG
AAGCCTCAGACATGTTTCATAACCTCCTGGAGCCTCCGTTTCCTTATCTTTCCAATGTAATGATGCCCATGTGCAGT
GGCTCACGCCTGTAATCCCAAGCACTTTAGGAGGCCGAGGTGGGTGGATCACTGGAGCTCAGGAGTTTGAGGCCAGC
CTGGGCAACATGGCAAAACGCCATCTCTACTAAAAACACAAATATTACCCAGGCATAGTGGCACATGCCTATAGTCC
CAGCTACTCAGGAGGCTGAGGTGGGAGGATCACCTGAGCTTGGGAAGTTGAGCCTGCAGTGAGCCAAGATTGTCACA
CTGCACTCTAGCCTGGAGGACAGAGTAAGAAGACCCTGTAACAAAACAAAACATAACAAAACAAACAAACAAAAAAC
CCAACTAATGACAATAAAATAAACCCTCCCTCACAGGGTGGTTGTGAGGATAAAGCACCCAGAATGAAGAGTGTTGC
TGCCATGTGCAGAACTTAGAAAGTGCTCAACAGATGCCAGCCAAACAGACATGGACTCCCCTCAACACAGTCAACCC
AAGGTTGACTGTCACCAAACGCAAAAGACCACACTGTAAAGCTTTTAGAAATGTGGTCTAGTGGCCGGGCACTGTGG
CTCATGCCTGTAATCTCAGCACTTTGGAAGGCTGAGGCGGGCGGATCACAGGGTCAGGAGTTCGAGACCAGCCTGAC
CACCTGACCAACGTGGTAAAACCCCGTCTCTACTAAAGATTCAAAAAATTAGCCGGGTGTAGTGCTACGTGCCTGTA
ATCCCAGCTGCTCGGGAGGCTGAGGCAGGAGAATCGCTTGAACCCAGGAGGCGGAGGTACAGTGAGCTGAGATCGCG
CCATTGCACTCCAGCCTGGGAGACAGAGAGAGACTCCGTCTCAAAAAAAAAAAAAAAAAAAAAGTTAGCCGGGTGGT
AGTGGCATGTACCTGTAATCCCAGCTACTTGGGAGGCTGAGGTAGGAGAATCGCTTGAGCCTGGGAGGTAGAGGGTT
GCGGTGAGCCAAGATGGCGCCACTGCACTCCAATCTGGGCGAGACACTGAGACCCTGTCTCAAAAAAAAAAAAAAAA
TGTGGTCTAGGAGACTCTCTTCACTTTGAGATAAAATTTGCATCACGTAAAGATAACCATTTTAACGAGAGCAAGTC
AACGGCATTCAGCACATTCAGAGTGTTGTGCAACAACCACTTCTCCCTGGTTCCAGGACATTTTCATCGCCTCAGAT
GGAAACGCCCTCCTCACGGAGGCATCTCTCCCGGCCTTTGTCCTCCCCGGCCCTGACAACCACTAATCTACTTTCTG
CTGGGATTTGCCCATTCTGGATGTTTCCTAAAAATGGCTTATCTAAGCCCCACAGTTTCATGCAGCACGTAGCCTCT
GGTGTGTGACGTCCTTCACTTGGTGTAATGGTTCGAGGCTTGTCCATGTCGTAGCCTGGGTCAGAACTTCATTTTCA
TGGCTGAATAATATCTCACGGTGTGGAAATATCACAGTTTGCTTATCTGTTCATCCAGTGATGGACATTTGGGTTGT
TTCTACCTTTTGGCTATTGGGAATGGAAGGGATAACATTTTTTAATTGGATTTTTAAAGTCACTAGTTTGACTGCAT
TAAAATTACAAACTTTTGTTTAACGAGAATATCACTAAGATACAGAGTTGGGGAGATCTAACACATAAAAGTGACAA
AGGAATTATATCCAGAATATTTTTGAAATTTCTACAAATCAGTGACTGGCAACACAGTGGGAAAGTGGCCAAGACTA
AAATACTTTAATAAAGAGGAAACCGAAATGGCCAGTAAATATGGGCTCAACCTCACTAATTATCAGGAAAATGTAAA
TTAAGACCACAAGAGAAACCACTACACACTCACCAAAAATCACACACCCAATAAAAAGGTAATTTTTTTTTTTTTTT
GAGATGAAGTCTCACTCTATTGCCCAGGCTGGAGTACAATGGCGCGATCTTGGCTCACTGCAACCTCCGCCTCCTGG
GTTCAAGCGATTCTCCTGCCTCAGCCTCCTGAGTACCTGGGATTACAGGCGCACACCACCACACCCAGCTAATTTTG
CATTTTTAAGTAGAGACGGGGTTTCACCATGTGGGCAAGGCTAGTCTCGAACTCCTGACCTCGTGATCTGCCCGCCT
TGGCCTCCCAAAGTGCTGAGATTACAGGCATCAGCCACTGTGCCCGGCCTAAAAAAGGCTAAAATTTAAGAAGACCA
GGAGTTTGACTGCTATGGTTGGAATGTTTGTCTCCTCTAAAACTCTTGTTGAAACTTAATCCCCAGTGTGGCAGCGT
TGAGAGGTGGGGCCTTTGGGGTAAGGAGGTTGGATCATGAGGGTCCTCCCCCAAGGAATGGATTAATGAGTTGTCAT
GGGAGTGTGGCTGGTGGCTTTATAAGAAGAGAGACCTGGCCGGGCACGGTGGCTGACACCTGTAATCCCAGCACTTT
GTGAGGCCGAGATGGGCGGATCACAAGGTCAGGGGATCGAGACCATCCTGGCTAACACAGTGAAACCCTGTCTCTAC
TAAAAAAAAAATGCAAAAAAATTAGCCGGGCGTGGTGGCGGGCACCTGTAGTCCCAGCTACTAGGAAGGCTGAGGCA
GGAGAATGGCGTGAACCTGGGAGGCGGAGCTTGCAGTGAGCCGAGATCGCGCCACTGCCCTCCAGCCTGGGCGACAG
AGCAAGACTCTGTCTCAAAAAAAAAAAGAAGAGAGATCTGAGGTGGCACACAAGCATGCTCAGCCCACACGACCTGC
GATTAATACTCTGTGCCACTTTGGGACTCTGCACGAGTCCCCACTGGGCTCGAAACTTCTCAGCCTCCGTAACTATA
GGAAATAAATTCCTTTTAAAATAAATTCCACAGTCTCAGGTATTCTATTATAAGCAACAGAAAATGGAGTACTACAC
CGATCATATCAAATGTTTAGAAGGATTTGGAGCAAGGAGAATGCTCGCACACCACTAGGGAAAACATAAGTTGGTTA
ACCACTGTGAAAAAGTTTGGCATTCTTTACTAAAGTTGAAAATCTATATGCCCTATGACCCAGCAACTTTACTCCTA
GGTATGTATGTACAAAATAGAATTTCAGGCATGTGGGTACCAGGTGACATGTAAAGGAATGTTTATTGCAGCATTAT
TCATAATAGCCAAGAACTAAACAACACAAAGTTCCAGCCCCAGTACAATGAATAAACTGTGGTATATTCCTACAAGG
AAATATTAATAGATACAGCAATGAAAATGAACACATATAACATGGCTGGTAAATCTGACATGAGAGAGTGAAAGAAG
ATGGACATTCAGTGTGCAGACAGTTGGATTAAAAATATTTTTTTAAAGGCCAGGCTTGGTGGCTCACATCTATAATC
CTAGCACTTACAGAGGCCAAGGCGGGCAGATCACCTGAGGTCAGGAGTTCAGGACCAGCCTGGCTAACACAGTGAAA
CCCCATCTCTACTAGAAAATACAAAAATTAGCCAGGTGTGGTGGTGCATGCCTGTAGTCCCAACTACTCGGGAGGCT
GAGGCAGGAGAATCACTTGAACCTAGGAGGCGGAGGTTGCAGTGAGCCAAGATCGCATCACTGTACTCCATCCTGGG
TGACAGAGCAAGACTGCGTCTCGAAAATAAATAGATAAATAAATAAATAACCAACAGGCCGGGAGCAGTGGCTCATG
CCTGTAATCCCAGCACTTTGGGAGGCTGAGGTGGGCAGATCACGAGGTCAGGAGATCAAGACCATCCTGGCTAACAC
AGTGAAACCCTGTCTCTACTGAAAATACAAAAAAATTAGCCGGGCATGGTGGCGGGCGCCTGTAGTCCCAGCTACTC
AGGAGGCTGAGGCAGGAGAATGGCATGAACCCGGGAGGTGGAGCTTGCAGTGAGCCGAGATCATGCCACTGCACTCC
AGCCTGAGCGACAGAGCGAGACTCCATCTCAAAAAAATAATAATTAAAAATAAATAAATTAAATAAATAAATAACAG
ATTGCATAAAGTGGCTCATGCCTGTAATCCAAGCACTTTGGGAGGCCAAGGCAGAAGGATCACTTGAGCCCAGGAGT
TCAGGACAAGCCTGAGCAACATGGTGAAACCCCACCTCTACAAAAAAAAAAAAAAAATTAGCTGGGCATGGTGGCAT
GTGCCTGTGATCCCAGCTACTTGGGAGGCTGAGGCAGGAGGATCACTTAAGCCTGGGAGGTCGAGGCTGCAATGAGC
TATGATCGTACCACTGCACTCCAGCCTGGGCAATAGAGCAAGACCCTGTCTCAAAACAAATAAACAAAAGCCAGACA
GACACAAATGAGAGCATTCTGTATCGTTTCATTTCTATGAAGGTGAAAAGCAGGCAAAAACAACCAAAGTGCTTGCA
GATGCATATCTGAGTAGTTAAAAACTTACTGAAAAGCAGGCCTGGCTCACGCCTTTAATCCCAGCACTTTGGGAAGC
GGGCGGATCACGAGGTCAGGAGATCGAGACCATCCTGGCTAACACGGTGAAACCCCGTCTCTACTAAAAATATAAAA
AATTAGCCAGGTATGGTGGCTAGTGCCTGTGGTCCCAGCTACTCGAGAGGCTGAGGCAGGAGAATGGCATGAATCCG
GGAGGTGGAGCTTGCAGTGAGCTAAGATCGTGCAACTGCACTCCAGCCTGGGCAGCAGAGCGAGACTCCCTCTCAAA
AAAAAAAAAACTTACTGAAAAGCAAGAAGTCAGGTGGAGGTTACCTTTGGGGAGGATTGGGGTGCTGTCCGCTTTCT
AATAATTCGTTAAACTATAGTCTACATCTTGTGCTATATTTCACAATGGAAAAACAGAAAAGAGCTCCTGCCCATAA
CGCTGCTTTGCAGGTTTGGAAATTTCAGATTCAATTCCTCTCCTTGCGGGGGCCAAGGATGGGAAGAGCAGGTGGTT
CCAGTAGGGAAAGAGGAGGCCCTGGGGCCTCAAAATGGCTAAGGACCATTCCTCAGCGTGGGTGGCACCTACCCTGG
AAACAGGACTCTACTTCCTCCTCTGTTAGGGGGCAGAGCAGCCCTGCAGTGCCTTCTGGGCACAGGTCCTCACTCTG
CAGCTGGAGGAATTCTCCCAGGCACTGAGAGCCCTTCACGGCCCAAATGCCCCGTGCGCTCGGCCTCTGGACTTGCC
TTCCCTGCTCTGTATATCTCCCTCCGCCTGACCCTCAGCCTCCTCCATCACTCACTGTCTTCTCTGCCAGTCTATTC
ATCTGTCTCTGTCCCTCTCTCTGCCACCTTCTCTCCTATTGAGAAGCCGAAACCTCAGGCACAGACCCACATCCCCT
CCTCATGGGCCCATGTGCCCAAGGTGCCCCTAGGTGCCAGGCTGAGATGAACCAGGAGTGTCCTTCTGAACCCAGCA
ACAGCGAAGGGTGACCAGGGAGGGCCAGTTCATCTCGGTCTGAAAGAAGCCCCAGATGAGCAAAGGATACACTGGCC
TCCTGCGGTCAGCAGCACTTCCCAGGACAGTGAGCAAGACAGGGGTAAGGCCAGAGTGGGTGGGCACACCCATGGGA
GAGAGGAGCCGCTGTGAAATGTGCACGAGGAACAGACCAGCAAGGAGGATCCACGCAGTGCTAGAAGGGAGTTCCTG
GAAGCCTGGTGGAGAGCCCCTCCCATCTGCTAAGCCCGGAGGGCATCAAAGGCTGCTGCTGCCCTCAACCCCTGACA
ATCTCATCATCTCATATCTCAGGCATGGAAGAATGAGGGCCATTACACGAGTAAAACATCAAGTACACTCCAGCCTG
GATGACAGGGCCAGGCTCCATCTCAAAAAAAAATGCCTGTGGTCAAAGCTCTCCTGACAGGGGAAAACAAAACAAAA
CAAACTTCTCCTTAAAGAAAACATTTGCCTTTGACTGCATCATAATTCCAGCAGGATTTTGTGCAGATAACTCTTTG
GCTAACTCTAAAATTAATACAGAAAGGTAAAGAAATTAGAATAGCCAAAGAAATTTTGAAAAGGAAGAATAAAGCGA
GAGGAATCACATTCCTCAATTTTTAACAGCTCTATTGAGATAAAATTCACATACCATACGGTTCACCCATTTAAAGT
GTATAATTCAGGCCGGGCGCGGTGGCTCACGCCTGTAATCCCAGCACTTTGGGAGGCTGAAGCGGGCAGATCACCTG
AGGTCGGGAATTCGAGACCAGTCTGACCAACATGGAGAAACCCCGTCTCTACTAAAAATACAAAATTAGCCAGGCGT
GGTGGCTCATGCCTGTACTCCCAGCTACTCGGAAGACTGAGGCAAGAGAATTGCTTGAACCCGGGAGACGGAGGTTG
CCATGAGCCGAGATCGCGCCACCACACCCAGCTGCCATTTTTTAATTGATTACTTGTCTATTTATTACTGAGTTGTA
AGATATTTTGGGCCAAGCACGGTGGCTAACGCCTGTAATCCCAGCACTTTAGGAGGCTATGGTGGGCAAATCACTTG
AGGTCAGGAGTTCGAGACCAGGCTGGCCAACATGGCAAAACACCATCTCTACTAAAAATACAAAAAAATTAGCCAGG
TGTGGCCAGGCGTGGTGACTCACGCCTGTAATCCCAGCACTTTGGGAGGCCAAGGCGGGTGGATCACCTGAGGTCGG
GGGCTCAAGACCAGCCTGACCAACATGGAGAAACCCCGACTCCGCTAAAAATACAAAATTAGCCGGGTGTGGTGGTG
CATGCCTGTAATCCCAGCTACTCACGAAGCTGAGGCAGGAGAATGGCTTGAGCCCAGGAGGCAGAGGTTGTGGTGAG
CTGAGATCATGCCATTGTACTCCAGCCTGGGCGACAAGAGCGAAATTCTGTCACAAAAAAAAAAAAACCATTAGCCA
GCCATGGTGATGCACACCCGTGGTCCCAGCTACTCAGGAGGCTGAGGTATGAGAATTGCTTGAACCCAGGAGGCAGA
GGTTGCAGCGAGCCAGGATTACGCCGCTGCACTCCAGTCTGGGTGACAGAGCAAGACTCTGTCTAAAAAAAAAACAA
AAACAAAAAAGATATTTTGTATGTGTTTGGATAACTTCCCTATCAGATATATGATTTGCAAATATGTTTCTCTCATT
CTGTGAGACATCATTCAATTTTAAGACATCACAGAGCTATGTTAATCAAGGCACTGTGGCTGTGGTAAAGGATAGAC
ACACAGAACAGAACAGAGAGCCCAGAAATGGACCCGCAAACCTATGCCCCATTCATTTTTTACAAATAAGTGCGAGA
AGCCAACTGAATAGAAAGCGTATAGCTTTTTCAAAAAACAGTGCTGGAACAATTGGACATCTGTAGGCAAAAAAACA
AACAAGCAAACAGAAGAATCTGGACCTGCCCTTCACACCTCAGACAAAAGTCATCTCAAAATGGATTGTAGATCTCA
ATATAAACATAAACTATACAACTTTAGAAGAAAATATAGGTGAAACTCTTTGTGTTCTGTGGTTAGGCAGACAGTTC
CTAGGCATGGCACTAAGTAAGATTCATTTAAAATTTTTTGACAAATTGGACTTTATTAAAACTTTTGCTCTACAAAA
GACAATATTAAGAGAATGAACTAACAAGCTACAAACTAAGAGAAAACATTTGCAAATTGCATATCTGACAAGGGATT
GCTTCCAGACGATACACAGAATTCTAAAAATTCATCCTTAAGAGAATAAACCACCCAATTTTTAAATGGGCAAAACA
GGCCAGGCGTGGTGGTGCACGCCTGTAATCCTAGCACTTTGGGAGGCCGAGGCAGGCGGATCACAAGGTCAGGAGAT
TGAGACCATCCTAGCTAACACGGTGAAACCCTGTCTCTACTAAAAATACAAAAAATTAGCCAGGCATGGTGGCAGGT
GCCTGTAGTCCCAGCTACTCGGGAGGCTGAGGCAGGAGAATGGCGTGAACCTGGGAGGCGGAGCTTGCAGTGAGTGG
AGATCGCACCACTGCGCTCCAGCCTGGGCAACAGAGCGAGACTCCGTCTCAAAAAAAAGACAAAATACTTGAAAAGA
TATTGGCTAGGCGCGCTGGCTCATGCCTGTAATCCCAGCACTTTGGGAGGCCAAGGCGGGTGGATCACAAGGTCAGG
AGTTCAAGCAGCCTGGCCAAGATGGTGAAACCCCGTCTCTACTAAAAAAAAAAAAAAAAAAAAAAAAAAAATTGGCC
GGGCACAGTGGCTCATGCCTGTAATCCCAGCACTTTGGGAGGCTGAGGCAGGTGGATCAGGAGTCAGGAGATCGAGA
CCATCCTGGCCAACATGGTGAAACCCCATCTCTATGAAAATACAAAAATTAGCCAGAGATGATGCCGGGTGCCTGTA
ATCCCAGCTACTCATGAGGCTGAGGCAGAAGAATCACTTGAACCAGGGAGTCAGAGGTTGCAGTGAGCTGAGATCGC
ACCACTGCACTCCACCCTGGGCGACAAATCGAGATTCCATCTCAAAAAAAGAAAAAAAAATTAAAAGGAATATTTGC
CTCATTATGTTACAATAACTAATATGGAAAGCAATATTGCAATGCCTATTAGCACATGACATTAGGTGAATTCTCCT
TTGTCCCCGGACCTGCTGCCTCCTCCTGCTTGTCAGGGGACAGATCCAGTACATCTCCCCTCAGCGCTGGGTGGACC
TAACCCTTGCTTTCTTGGAGGAAACCCAGGAATCCAGAGACAAAGTGGAAGGGTACTGGCATGTGGTTGGGCAGGGC
TGCCTGAGGTCGGTGTCAGCCGACCGTGGGGCTTGGTCCCAGGAGGCTGCTTACTGGGCCCTGCTCCTCTGGTTTCC
CCCAAGTCGTGATTCTGAAATGAATAAGGACGGTGCAGAACTGGACTACAAATGCAGGAGTGACTTCCTGGGAGGGT
GGGGCCCCTATCTCTCCTAGACTCTGTGGTCAGACTCTGGCCAACACCCCCTGTAAGGCCACAGGAGAGGAACAGGA
GTGATAGCCCCCAAACCCCAGTCCCACCAGGCCCTGAGGGCCCCTTTGTCACTGGATCTGATAAGAAACACCACCCC
TGCAGCCCCCTCCCCTCACCTGACCAATGGCCACAGCCTGGCTGGGCCCAGCTCCCTGTATATAAGGGGACCCTGGG
GGCTGAGCACTACCAAGGCCAGTCCTGAGCAGGCCCAACTCCAGTGCAGCTGCCCACCCTGCCGCCATGTCTCTGAC
CAAGACTGAGAGGACCATCATTGTGTCCATGTGGGCCAAGATCTCCACGCAGGCCGACACCATCGGCACCGAGACTC
TGGAGAGGTGAGTGTCAGACGGGACTGCCAGAGGGACTGGGTGGGAGGCCAGGTATGTGAGTGGGGACAGTGGGGAG
GGGGCGGTGGGGAGGGGACAGTGGGGAGGGGACCATGGAGAGGAGACAGTGGGGAGGGCACTGTGGGGAGAGGACAG
TGAGGAGGGGACCTTGGGGAGGGGACAGTGAGGAGGGAACCGTGGAGAGGGGACAGTGAGGAAGGGACAGTGAGGAC
AGATAGCGTTCCCTCTCAGTGAGGAGAGCAGGGTAAGGAGGGAACGATTAGGAGTTGCACAACCATCTGGGCTCGCT
GAGACCTGGGCAGGCACAGGCCCAGGTTCTGACAAGCAGAGGGTGAAAGGTTTCGTTCTAGGCCTGAAGGGCCTTAC
AGGGCAGCCAGGGCACTACAGCCTCTAAAGTCCCAGCATCTGGGATCAGGGCACTGTCCCAGCTTCAAATTCCCAGC
ATCTGATCCCCTGGGAGGGGCCAGGGAGCTTTTCCTTCCCTGGAACGCTGCTGGGAGGTCATGAGCCTGCAGAAGGG
GTGGCGGGCAACCCAGTCTGGGGCTGGGAGGGAGGTCCTGTGGCCAGAGGAGACGGTGGAGGGGCTGGGGGCACCAG
GCGTGCTGGAGGCGGAGGGCGGGAGATTTGGGGACCAGGCTGCACAGAACCCGTCGGAAGCAGGGCGATCAGCCGGG
AGCTGCAGAGGCCTGGGGGGCCTCTAGCCCAGGGCAGCCTGGGAGGGGCAGCTGCCTGGGCACCCGGGCCCCGCGAG
GAGGGGCTGGGGCCTGCTGCGGGGTCGCAGATGTGTCCCGGTGCTCGGAGAGGGCCGCAGGGCGCGTGGGCCGTGGC
GGGAGGCCGCGCTGCTGGGAGCTCACGGCCCCCGCCCCCCGTCCCAGGCTCTTCCTCAGCCACCCGCAGACCAAGAC
CTACTTCCCGCACTTCGACCTGCACCCGGGGTCCGCGCAGTTGCGCGCGCACGGCTCCAAGGTGGTGGCCGCCGTGG
GCGACGCGGTGAAGAGCATCGACGACATCGGCGGCGCCCTGTCCAAGCTGAGCGAGCTGCACGCCTACATCCTGCGC
GTGGACCCGGTCAACTTCAAGGTGCGCGGGGCGCGGTGCGGGCGGGGGGGGACGGGGCGGGGCGCGGTGCGGGCGGG
GCGGGGCGGGGCGGGGCGGGGAGGGGCGGGGAGGGGCGGGGTCGCGGGGCGGATGCGGGGGTCGCCGGGCGGGGCCC
GGGCTAGGCCCCGCCCCCTCACTGAGCCGCCCCCGCCCCCAGCTCCTGTCCCACTGCCTGCTGGTCACCCTGGCCGC
GCGCTTCCCCGCCGACTTCACGGCCGAGGCCCACGCCGCCTGGGACAAGTTCCTATCGGTCGTATCCTCTGTCCTGA
CCGAGAAGTACCGCTGAGCGCCGCCTCCGGGACCCCCAGGACAGGCTGCGGCCCCTCCCCCGTCCTGGAGGTTCCCC
AGCCCCACTTACCGCGTAATGCGCCAATAAACCAATGAACGAAGCAGCGTCCACCTGGTCTCTGTTGTCCGTGGGCG
GCGGGCGCTTGGGGAGGCGGAGCGGGAGGAGGGCGCCCCGGCTGTCTCGGGGCCACTGCTGGGCCGCAGGGATCCTT
GCACCGACCCCAGGGTCTCTAAGAGGCAGAGGGATGTGCAGCTCCCGGGGGGGGAGCGGGGGTCACTCGGGACCCAG
GCGTGGTGGAGAAGGGGTGCAGTTAGGCCTTTGCGGAGGGGGGAGCAGTGCTGGCGCCCACCCGCCGCGGCTCTCCC
TGGGACCTCCGTGGTCTTCCTTCTTTATTTCTCCCGAATGTGTACTATTTCCTGATTTCAGAACGATCAGGACGAAG
AGGGGAGGGATGGGCGTCTGCGCTCACTCATTCCTTCTTCCATTCCTCAATGAAACATTTACTGGGCATAAGACAGC
CTAGGCATGTTTCTAGGCTATGGATACCGCAGCTGAAATAAAGAAAGCCCTCTGCCCCGTGGGGCTGACAATCTAGT
GGGGGATACAGACGTGATGAAGACAGTCAGATCACAGTTCACAGAAATGAGACAGGAAAAGAGGCTGAGCCTCACTC
ATAAGAGAAACGCAAGTTAAACTACACAAAAATAAAAAACCTCACTGAGATCCATGTCTCACCTCCCTGATAGGCAA
AAATCCAAGAGTTTGATCAGACTGCAGGCGCCCCTCCTCCACTGGGCACCCCTCATCCAGGGCAGAGGGAACCAGCC
CGGGGCGCAAGTCCACCGGGGCATCTCATTTGCTAAAGACCTGAAAACCCAGGTGTCCATCATCAGGACTAACTGGA
AAAACCAAGGGTATCCGCACCATGGAGAGCTCGACTGAAAAAAAAAAATGAGGATAATTGGATAATTTCTTTTTTTT
TTTTTTTTTTTTTCAGACGGAGTCTCGCTCTGTCGCCCAGGCTGGAGTGCAGTGGTGCGATCCCGGCTCACTGCAAG
CTCCGCCTCCTGGTTTCAAGCGATTCTCCTGCCTCAGCCTCCCGAGTAGCTGGGTCTACAGGCGCCCGCCACCACGG
CTGGCTAATTTTTTGTATTTTTAGTAGAGACGGGGTTTCACCGTGTTAGCCAGGATGGTCTCGATCTCCTGACCTCG
TGATCCACCCGCCTCGGCCTCCCAAAGTGCTGGGATTACAGGTGTGAGCCACCGCGCCCGACCTAAAATGAGGATAA
TTTCTAATAATGAAAATAAAGAGGTTAGAATGGTGTGTATACAATGGTGGAACAGAGGAGAAACACGAATATGTGTG
TGCACATATATGTGAGCTTATGCATAACTATGTATGAGGCTGCGTGTGGACATGTGTGTTTGTGCACAACCATGTAT
GTGCCCGCATGTGCTTATTTCTGCAAAAATAAACCATGGCAGGACAAACCGGAAATGAATACAAATAATAAGGTGGG
TGGGGATGGAGGGGAAGGTGGAAGGAAGCTCCTGCAAGTCTGACTCTCTACATAGTTTTGACCTTTGATTTGTGTAA
ATATTTTACATTATCAAAAATAAATTCAGGCTGGGCATGGTGGCTCATACCTGTAGTCCTAGCACTTTGGGAGTCCA
AGGGGAGAGGATTGCTTGAGGCCAGGAGTTGAAGGCCACCCTGGCCAACATAGAGAGACCCTGTCTTTAAAAAAAAT
TACAAAATTAAGGCCGGGCGCGGTGGCTCACGCCTGTAATCCCAGCACTGTGGGAGGCCGAGGTGGGCGGATCACGA
GGTCAGGAGATTGAGACCGTCCTGGCTAACACGGTGAAACCCCGTCTCTACTAAAAAGTAGAAGAAATTAGCCGGGT
GTGGTGGCGGGTGCCTGTAGTCCCAGCTACTTGGGAGGCTGAGGCAGGAGAATGGTGTGAACCCGGGAGGCGGAGCT
TGCAGTGAGCCAGGTTCAAGCCACTGCCCTTCAGCCTAGGTGATAGAGTGAGACTCCTTCTCAAAAAAAAAAAAAAA
ATTACAAAATTAATAAGATTAAAATAAAAAGAGGGGCCTTGCCAGTGGCTCAAGCCTCTAATCCTACCACTTGGGAG
GCCAAGGCTGGAGGATCCCTTGATGCCAAGAGTCGGAGGCCAGCCTAGGTAACACAGCAGGACCTCGTCTCAAAAAG
ATTAAAAAATTAACTGGGCATGGTAGCCTCCAAATTGGGGGTTAGCCTGGGAGGTTTGCCCAGGAAGGAATTCAAGG
GCAAGCTGGTGGTGTTACACAGCAACTCTGATTGATATCGAAGCCACAGCAGACAGCAGGAGCAGAACACTGCTCCT
TACAGAGCAGGGGTACCCCATAGGCTGTGTGCACAGGAGAGCAACTCAGAGGCACTGCTGCACTCATCTTTATACCC
ACTTTTCATTATATGCAAATTAAGGGAAAGTTATGCACAAATTTCTAGGATGAGTGTGGTAACTTCTGGGTGGTCCA
GTCACTGCCATGGAAAGGGATGGTAAACTCCCATGGCACACTGGTGGGTGTGTCTTATGGAAAGCTGCTTCTGCCCT
ACTTGTTTTAGCTGGTCCTCAGTTTGGTCCGGTGTCCGAGCCCAACATCCGGAGTACATGCAGAGTCCCACCTCCTA
CGTCACACCTGCAGTTCCAGCTACTCAGGAGGCTGAGGCTGGAGGATTGCTGGAGCCCAGATGTTGAAGGCTACAGT
GAGCTATGATTGTGCCACCGCACTTCAGCCTGAGCAACACAGCAATACTCTCTCTCTAAAAAAGCAAAGCACACAAA
CAAAAAGAGTGACTGGGTGCAGTGGCTCACACTTGGAATCTTAGCACTTTGGGAGGCCAAGGTGGGATGGTCACTTG
AGCCTGGGAGTTCAAGACCAGCCTAGGCAACATAGCAAGACTTTATCTCTACTAAAATATATATATATTTTTTAATT
AGCTGGACATGGTGGTGCACCTGCAGTCCCAGCTACTTGGGAGGCTGAGTTGGGGGTGGAGGGGAGTATCACTTGAG
CCCAGAAGTTCCAGGCTGTAGTAAGCTATGATTGCACCACTGCACTCCAGCCTGGGCAACAGAGAGAGACCTTATCT
ATATTTAAAAAAAAAAAAAAAAAGAGAGAGAAAATTGAAAACTCCTAATTGAAAACCCCCAAATTGAAAACTAACTT
AAATAAATGAGCCAATGTAAGAATGTGGTGATATAATAATCAGAAAAAAGGATTGTTCCAGGTGACCTCTGAACACA
GAACCTCGGCTATGACCGAAAGAACTCCAAAGACACTCTAACACTCCGTGGTTTATTGTTCCTCATAACATATATAA
AATAATTTCATAAGCTTTTATTTTGAAACATATTCAGATTATGAAGAAATAAAAACACCCTGCAAGAATAAGACAAA
GATGGAGAAGGAAGGATGACTGCTGGTGGGTTTGGGGCTTTTGGAGGGTGATGGAAACCTTCTAAAATTGATTATGG
TGATGGTCGCACAATTATGTGAACACATTAAAAATTATTGAAATGGGCCGGGGGTGGTGGCTCACCCCTGTAATCCC
AGCACTTTGGGAGGCCAACGCGGGCAGATTACCTGAGCTCAGGAGTTCCAGACTAACCTGGCCAACATGGTGAAACC
CCCGTCCCTACTAAAAATGCAAAAATTAGCCACGCATGGTGGCACATGCCTGTAATCCCAGCTACTGGGGAGGCTGA
GGCAGGAGAATTGCTTGAACCCAGGAGACAGAGGTTGCAGTGAGCCGAGATTGTGCCACTGAACTCCAGCTTGGCCG
ACAGAGTGAGACTCTGTCTCAAAAAAAAAAAAAATTATTGAAATGTACACATTAAGTGGGTGAATTTTATCTCAATA
AAACTGTTAAATAAAATAACAAGAATATGAAAAACTCTTGAATACTACTCATCCAGACTCTCCAGCTGTTAACATTC
TACCACATCGGCTTGCTCTCTCTTGCCCCCACTTGCTCTTTCTCTCGGAGCCCTTGGAGAGGGGTATGCAAATATCC
GTACTCTAAATATCCTCCATATACTGTGTATTTCCTAAAATCAACAAGGACATTAGGCTGCACAGCCAGAGAACAAC
CATCAAAATCAGGTTAATATTGATCCAAATCCATCTATCAACAGAAGCAACATCAAGTTCAAGACCCTTTTGAAAGC
AATGATACCAGCCATTTACTCCATCCCTAAAGGACTGAGGGTGCTGCGAATTTAACCGTATCAATGCAGTCTTTTTG
ATGTTATTTACTGAAGGAAATGGATGTTCTTTAAAATATGTATTTATTTATTTTTCTTTTTTGAGACGGAATCTTGT
TCTGTCGCCCAGGCTGGAGGGCAGTGGGACAATCTTGGTTCACTGCAACCTCTGCCTCCTGGGTTCAAGAGGTTCTC
CTGCCTCAGCCTCCCGAGTAGCTGGGATTACAGGCGCGAACCACCACGCCCGGTTAATTTTGGTATTTTTAGTAGAG
GCGGGGTTTTACCATGTTGGCCAGGCTGGTCTCAAACTCCTGACATGGTAGCCTGTAATCCCAGCTACTCGGGAGGC
TGAGGCAGGAGAATCGCTTGAACCCAGGAGGTGGGGTTGCAGTGAGCCAAGATCGTGCCATTGCACTCCAGCCTGGG
AGACAGAGCGAGACTCCATCAAAAAAAAAAAAAAAAAAAATTCCTGAAGCTCCTCTTGAGCTTACATTCTAGTGGAC
TGTAAACAGAAACATTTTTTTTTCCTGTGGATAAAGAAAAGCAGGGCAAGTAGGGGCTTAGACAGAGGAGGGGAGGA
TTCAGATTTTAAATGGGTTGGCCACTGTAGGTCTATTAACGTGGTGACATTTGAGGGAGTGGCAATACTAGGGAAGG
GGCTTCAGGGGAGTGGCCAGGAGCTAGGGATAGAGGGAGGGAGGACAGGAGGCCTTGTCTGTCTTTTCCTCCATATG
TAAGTTTCAGGAGTGAGTGGGGGGTGTCGAGGGTGCTGTGCTCTCCGGCCTGAGCCTCAGGAAGGAAGGGCAGTAGT
CAGGGATGCCAGGGAAGGACAGTGGAGTAGGCTTTGTGGGGAACTTCACGGTTCCATTGTTGAGATGATTTGCTGGA
GACACACAGATGAGGACATCAAATACATCCCTGGATCAGGCCCTGGGGCCTGAGTCCGGAAGAGAGGTCTGTATGGA
CACACCCATCAATGGGAGCACCAGGACACAGATGGAGGCTAATGTCATGTTGTAGACAGGATGGGTGCTGAGCTGCC
ACACCCACATTATTAGAAAATAACAGCACAGGCTTGGGGTGGAGGCGGGACACAAGACTAGCCAGAAGGAGAAAGAA
AGGTGAAAAGCTGTTGGTGCAAGGAAGCTCTTGGTATTTCCAATGGCTTGGGCACAGGCTGTGAGGGTGCCTGGGAC
GGCTTGTGGGGCACAGGCTGCAAGAGGTGCCCAGGACGGCTTGTGGGGCACAGGTTGTGAGAGGTGCCCTGGACGGC
TTGTGGGGCACAGGCTGTGAGAGGTGCCCAGGACGGCTTGTGGGGCACAGGCTGTGAGGGTGCCCGGGACGGCTTGT
GGGGCACAGGTTGTGAGAGGTGCCCGGGACGGCTTGTGGGGCACAGGTTTCAGAGGTGCCCGGGACGGCTTGTGGGG
CACAGGTTGTGAGAGGTGCCCGGGACGGCTTGTGGGACACAGGTTGTGAGAGGTGCCTGGGACGGCTTGTGGGGCAC
AGGCTGTGAGGGTGCCTGGGACGGCTTGTGGGGCACAGGTTGTGAGAGGTGCCCGGGTCGGCTTGTGGGGCACAGGT
TGTGAGAGGTGCCCGGGACGGCTTGTGGGGCACAGGTTGTGAGACGTGCCCGGGACGGCTTGTGGGGCACAGGCTGT
GAGGGTGCCCGGGTCGGCTTGTGGGGCACAGGCTGCAAGAGGTGCCCGGGACGGCTTGTGGGGCACAGGCTGTGAGG
GTGCCCGGGACGGCTTGTGGGGCACAGGCTGTGAGGGTGCCCGGGACAGCTCGTGGGGCACAGGTTGTGAGAGGTGC
CCGGGACGGCTTGTGGGGCACAGGCTGTGAGGGTGCCTGGGACGGCTTGTGGGGCACAGGTTGTGAGAGGTGCCCGG
GACGGCTTGTGGGGCACAGGTTGTGAGGATGCCCGGGATGGCTTGTGGGGCACAGGTTGTGAGAGGTGCCTGGGACG
GCTTGTGGGGCACAGGCTGTGAGGGTGCCCGGGACGGCTTGTGGGGCACAGGCTGTGAGAGGTGCCTGGGACGGCTT
GTGGGGCACAGGCTGTGAGGATGCCCGGGACGGCTTGTGGGGCACAGGTTGTGAGGGGTGCCCAGGACGGCTTGTGG
GGCACAGGCTGCAAGAGGTGCCCAGGACGGCTTGTGGGGCACAGGTTGTGAGAGGTGCCCGGGACGGCTTGTGGGGC
ACAGGCTGTGAGGGAGCCCGGCACGGCTTGCAGCTACAGGGAGAAAAGACTTGGTGCTGTGGGCCTGCCTTGGGGCT
GGTGGTACAGCCCTTATCTGCTGCCCTCAGGATCTCCCGGCCCCTCTCGTCCAGGCCCCTGCAACCCCATGCCCCAG
CCTCTGAGGACCAAAGGCGCCCCTGCTTGGGAAGAGGGGGCTCAGGGGAGTCGCCTGACCCGGTTCCAAGCCAGGCT
GATTTACCGTTGCTAACATCCTATCGCACGCATCCCTCTGCCTCATGCACCCAACCCCAAGGCCTGGTACACTGCAG
GCCCCAAGGTCCTGTGCGTCCTTTCAATACCCTCCTCACCTGCCTCACCTGCCCCCCCTACCCTGACTCTGGCTGGA
GACCCCCTCCAGGGAGTTTTCAAAACAAAGGGTGTCAGTCTCCTGTGGGATTCCCTCACCTCTGCAGCCTGCGGTCT
GAAAGCTGCCCCATGGTGTGTAGTGCTAAACTTCCAACTTACTCCAGGCCAGCGGTGACAGCCCGAGGGCAGGAAGG
GCACCCACACTGAGCCTCAAACAGCTAATTTTGCAACTGTAAGTCCATATAATTGTCTTGAAAAGTAATTTGTTTCA
AAAAGCTAAAAAACGAATACTCTTGAGTCTCCTTCTAGTAATTCCCCTTCTAGAGGTCTATCACCAGGAAAAGATCC
AAAGCACTGATATTCTTCATGGAGTTGTTTATAATAGAAAAAAACTAGAGCTTGTTCACAAAGGGGAGCTCTGCAGG
CTGAAGATGTTGCACCTGTCAGCGGGGATGGGGGCACGCTTGCTGACGCAGCAACGGAAAAGCATCAGTGTGTGAAG
ATGCATTTTCTCTCTTTCTATTATTATTATTTTTATTTTTATTTTTTCTGAGGCAGAACCTCGCTCTGTCACCCAGG
CTGGAGTGCAGTGATGCGACCTCATCACAACCACGAGCCACCATGTGCGGCCCCATGAGCAAGCCACCACGCCCAGC
CTTTTTTTCCCTTGTTTTAAAAAATCCTCTATTTAAAAAAGATGTGCATGGGCCGGGCACGGTGGTTCACGCTCATA
ATCCCAGCTCTTTCAGAGGCCGAGGCAGGCAGATCACCTGAGGTCAAGAGTTCGACACCAGCCTGGCCAACATGGTG
AAATTCCATCTGTACTAAAAATACAAAAATTAGCCAGGCCGTGGTGGTGTGTGCCTGTAATCCCAGCTACTCAGGAG
ACTGAAGCAGGAGAATCACTTGAACCCAGGAGGCAGAGGTTGCAGTGGGTCAAAATCATGCCACCACACTCCAGTCT
GGGAGACAGAGCAAGACTCCATCTCAGAAACAAACTAACAAACAAAATTTTTATATCTACCTATAATTCGTATAAAT
TTAAAATACATGCATAAAATCATACCCTTTGCAAGCACACGTACTAACTAAAAGGAATATATTCAGCACATAGAAAT
GGTTGTCTAACGGAGGAGGGGGGAGTTAATAAACAGAGAGGATAAAAAGAAATAAATCAGTAGAGCTGGAGGAGGGT
CTCCTCCAGGCTGCGATGAGAACATAGTGAGCAGAATTGCAGGCCTGCATGACCTCACCTTCTGTGAGGAGTCCGGC
CTCCCAAGACGCTTTCCTGCCTAGGTGCCCGGCTCAGAGTGTCCCCTACAAGGCTACTGGAGGAGAACCCCAGACCG
AGCCTCATTCAGGTGAGGGGGCTGCACACCGGAGGTGGGAGAGGTCTGTCCCTTCCCACCCTGTGACACTGGGTCCC
ACTTTCTCTCTAGGGGGTCTCGGTTTCCTCATTTGCAAACTGGAGCTCATAAGGTGGGCCAGAGAAGTTTCAGTGAA
GTGAGGAATGGATCGTCCCTCTGCCAGGGCCCATGTGCTCTAGGTCACCCTGTCATCACAGGGACAGGGAGGTCAAG
GACAGTCACTCCTGAGGCCAGTCCGGGCTGGGCTGACCACGTGGACTCTCATGCCCAGATTGGGGCCCCAATCTCCC
TGAAGCTGGGGCTCCAGCTGTGACTCAGGGGTGGGCAGAAGGGGAGACAGAAGCGATAGGTTCCTCAGCCCCCAGTC
CCACCTGAGGGCCCCTTTGTCACTGGATCTGATAAGAAACACCACCCCTGCAGCCCCCTCCCCTCACCTGACCAATG
GCCACAGCCTGGCTGGGCCCAGCTCCCTGTATATAAGGGGACCCTGGGGGCTGAGCACTACCAAGGCCAGTCCTGAG
CAGGCCCAACTCCAGTGCAGCCGCCCACCCTGCCGCCATGTCTCTGACCAAGACTTAGGGGACCATCATTGTGTCCA
TGTGGGCCAAGATCTCCACGCAGGCCGACACCATCGGCACCGAGACTCTGGAGAGGTGAGTGTCAGATGGGACTGCC
AGAGGGACTGGGTGGGAGGCCAGGTATGTGAGTGGGGACAGTGGGGAGCGGGCAGTGGGGAGGGGACCGTGGGGAGG
GGACAGTGAGTAGGAGACAGTGGGGAGAGGACAGTGGAGAGGGGACAGTGAGGAGGGGACCATGGGAAGGGGACCGT
GGAGTGGGGACAGTGAGGAGGGGACCATAGGGAGGGGACAGTGGGGAGGGGACAGTGAGGAGGGGACCGTGGGGAGG
GGACAGTGAGGAGGGGACCGTGGGGAGGAGACAGTGAGGAGGGGACCGTAGGGAGGGGACAGTGAGGAGGGGACCGT
GGGGAGGGGACAGTGAGGAGGGGACCGTGGGGAGGGGACAGTGAGGAGGGGACCGTGGGAAGGAGACAGTGAGGAGG
GGACCTTGGGGAGGGGACAGTGAGGAGGGGACCATGGGGAGGGGACAGTGAGGAGGGGACAATGGAGAGGGGACAGT
GAGGAGGGGACTGTGGGGAGAGGACAGTGAGGAGGGGACCATGGGGAGGGCACAGTGGGGAGGGGAGAGTGAGGAAG
GGACAGTGAGGAGGGGACTGTGGGGAGGGGACAGTGGAGACAGATAGCCTTCCCTCTCAGTGAGGAGGGCAGGGTAA
GGAGGGAACGATTAGGAGTTGCACAACCATCTGGGCTCGCTGAGACCTGGGCAGGCACAGGCCCAGGTTCTGACAAG
CAGAGGGTGAAAGGTTTCGTTCTAGGCCTGAAGGGCCTTACAGGGCAGCCAGGGCACTACAGCCTCTAAAGTCCCAG
CATCTGGGATCAGGGCACTGTCCCAGCTTCAAATTCCCAGCATCTGATCCCCTGGGAGGGGCCAGGGAGCTTTTCCT
TCCCTGGAACGCTGCTGGGAGGTCATGAGCCTGCAGAAGGGGTGGCGGGCAACCCAGTCTGGGGCTGGGAGGGAGGT
CCTGTGGCCAGAGGAGACGGTGGAGGGGCTGGGGGCACCAGGCGTGCTGGAGGCGGAGGGCGGGAGATTTGGGGACC
AGGCTGCACAGAACCCGTCGGAAGCAGGGCGATCAGCCGGGAGCTGCAGAGGCCTGGGGGGCCTCTAGCCCAGGGCA
GCCTGGGAGGGGCAGCTGCCTGGGCACCCGGGCCCCGCGAGGAGGGGCTGGGGCCTGCTGCGGGGTCGCAGATGTGT
CCCGGTGCTCGGAGAGGGCCGCAGGGCGCGTGGGCCGTGGCGGGAGGCCGCGCTGCTGGGAGCTCACGGCCCCCGCC
CCCCGTCCCAGGCTCTTCCTCAGCCACCCGCAGACCAAGACCTACTTCCCGCACTTCGACCTGCACCCGGGGTCCGC
GCAGTTGCGCGCGCACGGCTCCAAGGTGGTGGCCGCCGTGGGCGACGCGGTGAAGAGCATCGACGACATCGGCGGCG
CCCTGTCCAAGCTGAGCGAGCTGCACGCCTACATCCTGCGCGTGGACCCGGTCAACTTCAAGGTGCGCGGGGCGCGG
TGCGGGCGGGGCGGGGCGGGGCCGCGGGGCGGGCGGGGCCGCGGGGCGGGGTCGCGGGGCGGGGCGGGGTGGGGTCG
CGGGGCGGGGCGGGGTCGCGGGGCGGGGCGGGGCGGGGGGGGGGGGGCGGGGCGGCCGGGGCCCGGCGGGGCGGGGC
GGGGCGGGGAGGGGCTGGGCGGGGCGGGGCGCGGGGCGGGGCGGGCCGGGCCGGGGCGGGGTCGCGGGGCGGGGTCG
CGGGGCGGGGCGCGGGGCGGGGCGGGGGGGGGTGGGGTCGCGGGGCGGGGCCCGGGCTAGGCCCCGCCCCCGCACTG
AGCCGCCCCCGCCCCCAGCTCCTGTCCCACTGCCTGCTGGTCACCCTGGCCGCGCGCTTCCCCGCCGACTTCACGGC
CGAGGCCCACGCCGCCTGGGCCAAGTTCCTATCGGTCGTATCCTCTGTCCTGACCGAGAAGTACCGCTGAGCGCCGC
CTCCGGGACCCCCAGGACAGGCTGCGGCCCCTCCCCTGCCCTTCACCCTCCCACAGTTCCTGCCCTGACTCCAATAA
ATGGATGAGGACGGAGCGATCTGGGCTCTGTGTTCTCAGTATTGGAGGGAAGGAGGGGAGAAGCTGAGTGATGGGTC
CGGGGGCTTCGCAGGAACTCGGTCGTCCCCACTGTCGTCGCGGCCTGGGGTTCACTTGGGGGGCGCCTTGGGGAGGT
TCTAGCCCCTGAGCACCGGAGCTGCGGCCCGGGTGGAGCGGAGCAGTCCCGGGCCGGCCCGCGGCGTCTCCTGGGGT
CCTTGAGTCGGACGGGCGTTTGTGCGTCTCCCGGCTTCCCATATCGCACAAAGATTGTCACTTCACTAAGCGTATTG
GAAGCGTGTCGGGGCTCAGGGAACTTTTCCACAAAGCCTGACGTCCGAATCCCGGGACTCTGGCAGCTACGGGGGTC
CCTGAGGCCGGTCCCTCCCCGACTCCTAAGAGAGTAGGGGGTTTCCTGCCCGGTGTTCTCTCTCCGGTTCCTCCCAT
GTGCTCCCTCCTGGCAGAGCAGTAACTTTACCCGAGGGGAGTAAACAGATGCCCCTAAAGTCTGCAGTAAAGGTGCC
CACGCGCAACGGCGTGGGTCAATGCCAGAAACCCTGGGATCCCGGAGGTCGAGGCCTCCACACAGACGGGAACCCGG
GCTGGTTACGTTCCCCGGCGCAGGCCGAGGGTCCCCGCGTTCCCGCCGCGCTCGGGCCGATAAGGACGGGCGGGGTG
CCCGGAGGCTCTATAAGGAGGCCAGGGCGGCGGGCGCGGCCCCCAGAGCACGTCAGGCGGCGCCATGCTCAGCGCCC
AGGAGCGCGCCCAAATCGCGCAGGTCTGGGACCTGATTGCGGGCCACGAGGCGCAATTCGGGGCGGAGCTGCTGCTC
AGGTCGGTAGAGGCGGGGTCTCCGGGAGCTCAGGGAGGTGGAGATGAGGGTTTTGGGCGCGTGGGCCGCCAACGCCA
TCCAAGGTCCTTCGGGTGCGGATCCCCGGGCTCTGGGCGGTGTGGGCGCTAGTGAAGCCCCACGCAGCCGCCCTCCT
CCCCGGTCACTGACCTGGTCCTGCAGGCTCTTCACGGTGTACCCCAGCACCAAGGTCTACTTCCCGCACCTGAGCGC
CTGCCAGGACGCGACGCAGCTGCTGAGCCACGGGCAGCGCATGCTGGCGGCTGTGGGCGCGGCGGTGCAGCACGTGG
ACAACCTGCGCGCCGCGCTGAGCCCGCTGGCGGACCTGCACGCGCTCGTGCTGCGCGTGGACCCAGCCAACTTTCCG
GTGAGGCCTTTCCGGCCGGGGCAATGGTGCAGCGCGCAGCCGGGGTGGGGGGGCTCTGGGGGTCCCTAGCGGGGCAG
ACCCCGTCTCACCGGCCCCTTCTCCTGCAGCTGCTAATCCAGTGTTTCCACGTCGTGCTGGCCTCCCACCTGCAGGA
CGAGTTCACCGTGCAAATGCAAGCGGCGTGGGACAAGTTCCTGACTGGTGTGGCCGTGGTGCTGACCGAAAAATACC
GCTGAGCCCTGTGCTGCGCAGGCCTTGGTCTGTGCCTGTCAATAAACAGAGGCCCGAACCATCTGCCCCTGCCTGTG
TGGTCTTTGGGGAGCTAGCAAAGCGAGGTCACTATTGTTGGCCAGTGAAGCTCAGGGACCTAAAAGGAGCCTCCTAG
AACTCTCAAATGCGCCCCACCCCCGGAGGTTTGTCCTCCCATGGCGAGGAGTGCGATGGGGCAGAGGGAGCACTGTG
ATGTGGCGGGGGTAGGGAGGGTGGCCTTCGACTTCAACCCTTGAATCGGGCTTCCAACCATACTGTTCGCAAAGCAC
TTCCCCATTCACGCATTTATTCATTCATTCTCCCTCCATCCCCACTTCCTGCTGGGACCTGTAGATGCTAATCCTGG
CCCTTTTTGCAGAGAGATGCAGAAACTGAGGTCCCAGAGCCAAATGTGCAACCTAATTCGTTGGCCCAGAGCAGAGG
GCTCCGCAGACCTGTTCCTTTCCCCTTCCTTCCCCCATGGACACTTCCTCAGTGGCAAACCTGCGCTAGCCTGGTTA
GCCCTCCCTGTGACCCTGCAGCCCTGGGGATGAGGTCGGGAGGAAGTCCTCAGTGGCCACAATTTGGCAGACAGAGC
AGGTTTAGTCTTCCAGCCTGCTCAATGACAAGCTGTGCGACCCTGGGCGTGTCCCAGAGCTCTCAGGCCTTTACCTA
TCGAATAGAAAAACAACGTCCAACTCACGAGATTTTTGAAATAATTTTTGAAATCATAACACAGGGTGGGTGCCTGC
AGGGTCGTTGCCACCCCACCCCTCCACCCAGCCCCAGCTGCCGTGTCTCAATCTCTGCAGGTGCCCAGGCCAAGGCA
CTCCCTTCCCCAGGTTCCCTCTTCTCCCTCCCCAGGACTGGGAAGGGAATCTTAGGGCTCCACCCCAGGCTTTTCAG
ACAAAGAATAGGGGCTGAGGAAAGAGTGGGACCTTGGAGGTCTCCAAACCCTGAATAGGGTTGGCTCTGGGTTGGCC
ATCCTGGGTCTGTGTGGGGAGCACTGGACCAGGCCTGGCACCCAGGTCTGACCTGGCAGTCAGCAACGAGGTCTGAA
GAGAGCTGCTGGAAGTGGAGCCCTGACTGTGAGTCGGCCAAACTCCCCCCAGCAGTCAGTGCCAGTGACCTGTTGCC
CTGCACTGCCTGGGACCCCAGCCCGGTAGTTTGGAGAACTTGGCCCCACGTTATCTACATCCCCCAACTGTTTTTTT
GTTTTTGGGGGTTTTTTTTTTTTTTGCTTTGTTTTTGTTTTTGAGATAGGCCCTTGCTCTGACACCCCGGCTGGAGT
GCAGTGGCACAGTTTTGGCTCACTGCAGCCTCAACCTCCTGGGTTCAAGCGATTCTCCTGCCTCTGTCTCCCGTGTA
GCTGGGATTACAGGCATGGGCCGCCATTCCTGGCTAATTTTTGTATTTTTAATAGAGACACAGTTTCACCATGTTGA
TCAGGCTGGTCTCAAACTCCTGACCTCAAGTGATCTGCCCTCCTCGGTCTCCCAAAGTGCTGGGATGACAGGCGTGA
GCCACCACACCCAGCCCCCGCAACTGTTTACATGGATAATTAACAGCTTTTTGTCCCAGGCAGAGTTTGGTGTGAAA
GCAGCTTATGTTTCACTTTGGAAAAACTGTGCTCTTCTCCCCATCCAGGAAGCTGCCTGGGTCTGGGCCATATGTGG
ATACCTTATGGGTATAAGCTGCTCAGGACCCTGTGTGGAAGCTCAGGACAATGCCAGCGGGAAGGCTACCATGTGGA
GAGCTGGTCTCTGTTTGGGCAGGACTAAGAGACGCAGGGCAGCCTTGGGCAACCTGTCTACTCTCACTCACTCCTCC
TCCCCTTTCCTGTGCCAGGCACCTCCTGGCAACTTGCCAGCCAATGACCCTGCATCCCAGGCATAAGAGCTCCTACT
CTCCCCCACCTTTCACTTTTGAGCTTACACAGACTCAGAAATAAGCTGCCGTGGTGCTGTCTCCTGAGGACAAGGCT
AACACCAAGGCGGTCTGGGAGAAAGTTGGCAACCACACTGCTGGCTATGCCACGGAGGCCCTGGAGAGGCAAGAACC
CTCCTCTCCCTGCTCACACCTTGGGTCCAACGCCCACTCCAGGGCTCCACTGGCCACCCCTAACTATTCTTACCCTG
GACCCAGCCCCCAGCCCCTCACTCTTTGCTTCCCCCTGAAGCATGTTCCTGACCTTCCTCTCACTTGGCCCTGAGTT
ATGGCTCAGCCCAGATCAAGAAACAATGCAAGTAGGTGGCCGACACGCTGACCAATGCCGTGGTCCACTTAGATGAC
ATGCCCAATGATGTGTCTGAGCTGAGGAAGCTGCATGTCCACGAGCTGTGGGTGGACCCAGGCAACATCAGGGAGAG
CTTTGGGCTGGGAGGAATCTAGGGTGTGGGGGCAGCTGGCCTTCCTCATAGGACAGACCCTCCCACGCGTTCAGGGA
GGTGGAGCACAGGTGGCAGTAGTATCTGCATCCCCTGACTCTCTCTCCACAGTTCCTGGGTAAATGCCTGCTGGTGA
CCTAGGCCTGCCACACCCTTCCCAGTTTACCCATGTGGTGCCTCCATGGACAAATTATTTGCTTTTGTGAGTGCTGT
GTTGACCTAAAAACACCATTAAGCTAGAGCATTGGTGGTCATGCCCCCTGCCTGCTGGGCCTCCCACCAGGCCCTCC
TCCCCTCCCTGCCCCAGCACTTCCTGATCTTTGAATGAAGTCCGAGTAGGCAGCAGCCTGTGTGTGCCTGGGTTCTC
TCTGTCCCGGAATGTGCCAACAGTGGAGGTGTTTACCTGTCTCAGACCAAGGACCTCTCTGCAGCTGCATGGGGCTG
GGGAGGGAGAACTGCAGGGAGTATGGGAGGGGAAGCTGAGGTGGGCCTGCTCAAGAGAAGGTGCTGAACCATCCCCT
GTCCTGAGAGGTGCCAGGCCTGCAGGCAGTGGCTCAGAAGCTGGGGAGGAGAGAGGCATCCAGGGTTCTACTCAGGG
AGTCCCAGCATCGCCACCCTCCTTTGAAATCTCCCTGGTTGAACCCAGTTAACATACGCTCTCCATCAAAACAAAAC
GAAACAAAACAAACTAGCAAAATAGGCTGTCCCCAATGCAAGTGCAGGTGCCAGAACATTTCTCTCATTCTCACCCC
TTCCTGCCAGAGGGTAGGTGGCTGGAGTGAGGGTGCTGGCCCTACTCACACTTCCTGTGTCATGGTGACCCTCTGAG
AGCAGCCCAGTCAGTGGGGAAGGAGGAAGGGGCTGGGATGCTCACAGCCGGCAGCCCACACCTGGGGAGACTCTTCA
GCAGAGCACCTTGCGGCCTTACTCCTGCACGTCTCCTGCAGTTTGTAAGGTGCATTCAGAACTCACTGTGTGCCCAG
CCCTGAGCTCCCAGCTAATTGCCCCACCCAGGGCCTCTGGGACCTCCTGGTGCTTCTGCTTCCTGTGCTGCCAGCAA
CTTCTGGAAACGTCCCTGTCCCCGGTGCTGAAGTCCTGGAATCCATGCTGGGAAGTTGCACAGCCCATCTGGCTCTC
AGCCAGCCTAGGAACACGAGCAGCACTTCCAGCCCAGCCCCTGCCCCACAGCAAGCCTCCCCCTCCACACTCACAGT
ACTGAATTGAGCTTTGGGTAGGGTGGAGAGGACCCTGTCACCGCTTTTCTTCTGGACATGGACCTCTCTGAATTGTT
GGGGAGTTCCCTCCCCCTCTCCACCACCCACTCTTCCTGTGCCTCACAGCCCAGAGCATTGTTATTTCAACAGAAAC
ACTTTAAAAAATAAACTAAAATCCGACAGGCACGGTGGCTCACACCTGTAATCCCAGTACTTTGGGAGGCTGAGGCG
AGAGGATCACCTGAGGTCGGGAGTTTGAGACCAGCCTGACCAATATGGAGAAACCCCAGTTATACTAAAAATACAAA
ATTAGCTGGGTGTGGTGGCGCATGCCTGTAATCCTAGCTACTAGGAAGGCTGAGGCAGGAGAATCGCTTGAACCCGG
GAGGTGGAGGTTGAGGTGAGCTGAGATCACGCCATTGCACTCCAGCCTGGGCAACAAGAGCAAAACTCCGTCTCAAA
AAATAAATAAATAAATAAATAAATAAACTAAAATCTATCCATGCTTTCACACACACACACACACACACACACACACA
CCCTTTTTTGTGTTACTTAAAGTAGGAGAGTGTCTCTCTTTCCTGTCTCCTCACACCCACCCCCAGAAGAGACCAAA
ATGAAGGGTTTGGAACTCAGCCCATGGGCCCCATCCCATGCTGAGGGAACACAGCTACATCTACAACTACTGCCACA
GGCTCTCTTTTTGGACAAAAATACCATCATACTGTAGATACCTGTGTACAACTTCCTATTCTCAGTGAAGTGTCTCC
CCTGCATCCCTTTCAGCCAGTTCATTCAGCTCTGCGCCATTCCACAGTCTCACTGATTATTACTATGTTTCCATCAT
GATCCCCCCAAAAAATCATGACTTTATTTTTTTATTTTTATTATTATTATTTTTTTTTTTTTTTTTGTGACGGAGTC
TCGCTCTGTCACCCAGGCTGGAGTGCAGTGGCACAATCTCGGCTCACTGCAAGCTCCACCTCGCAGGTTCACGCCAT
TCTCCTCCCTCAGCCTCCCGAGTAGCTGAGTAGCTGGGACTACAGGCGCCCCCCACTACGCCTGGCTAATTTTTTCT
ATTTTTAATAGAGACAGAGTTTCACTGCATTAGCGAGGATGGTCTCGATCTCCTGACCTCGCATCTGCCCGCCTCAG
CCTCCCAATGTGCTGGGATTACAGGCGTGAGCCACCGCGCCCGGCCTTATGTATTTATTTTTTTGAGACAGAGTCTC
GCTGTGTCGTCAGGCTAGAGTGCTGTGGCACGATCTCGGCTCACTGCAACCTCCAACTCCCTGGTTCAAAGGATTCT
CCAGCCTCCACCTCCCGAGTAGCTGGGATTACAGGCGTGCACCACCACACCCAGCTAATTTTTGTATTTTTAGTAGA
GACGGGGTTTCTCCATGTTGGTCAGCCTGGTCTCGAACTCCCGACCTCAGCTGATCCACCCGCCTTGGCCTCCCAAA
GTGCTGGGATTACAGGCGTGAGCCACCGAGCCTGGCCAAACCATCACTTTTCATGAGCAGGGATGCACCCACTGGCA
CTCCTGCACCTCCCACCCTCCCCCTCGCCAAGTCCACCCCTTCCTTCCTCACCCCACATCCCCTCACCTACATTCTG
CAACCACAGGGGCCTTCTCTCCCCTGTCCTTTCCCTACCCAGAGCCAAGTTTGTTTATCTGTTTACAACCAGTATTT
ACCTAGCAAGTCTTCCATCAGATAGCATTTGGAGAGCTGGGGGTGTCACAGTGAACCACGACCTCTAGGCCAGTGGG
AGAGTCAGTCACACAAACTGTGAGTCCATGACTTGGGGCTTAGCCAGCACCCACCACCCCACGCGCCACCCCACAAC
CCCGGGTAGAGGAGTCTGAATCTGGAGCCGCCCCCAGCCCAGCCCCGTGCTTTTTGCGTCCTGGTGTTTGTTCCTTC
CCGGTGCCTGTCACTCAAGCACACTAGTGACTATCGCCAGAGGGAAAGGGAGCTGCAGGAAGCGAGGCTGGAGAGCA
GGAGGGGCTCTGCGCAGAAATTCTTTTGAGTTCCTATGGGCCAGGGCGTCCGGGTGCGCGCATTCCTCTCCGCCCCA
GGATTGGGCGAAGCCCTCCGGCTCGCACTCGCTCGCCCGTGTGTTCCCCGATCCCGCTGGAGTCGATGCGCGTCCAG
CGCGTGCCAGGCCGGGGCGGGGGTGCGGGCTGACTTTCTCCCTCGCTAGGGACGCTCCGGCGCCCGAAAGGAAAGGG
TGGCGCTGCGCTCCGGGGTGCACGAGCCGACAGCGCCCGACCCCAACGGGCCGGCCCCGCCAGCGCCGCTACCGCCC
TGCCCCCGGGCGAGCGGGATGGGCGGGAGTGGAGTGGCGGGTGGAGGGTGGAGACGTCCTGGCCCCCGCCCCGCGTG
CACCCCCAGGGGAGGCCGAGCCCGCCGCCCGGCCCCGCGCAGGCCCCGCCCGGGACTCCCCTGCGGTCCAGGCCGCG
CCCCGGGCTCCGCGCCAGCCAATGAGCGCCGCCCGGCCGGGCGTGCCCCCGCGCCCCAAGCATAAACCCTGGCGCGC
TCGCGGGCCGGCACTCTTCTGGTCCCCACAGACTCAGAGAGAACCCACCATGGTGCTGTCTCCTGCCGACAAGACCA
ACGTCAAGGCCGCCTGGGGTAAGGTCGGCGCGCACGCTGGCGAGTATGGTGCGGAGGCCCTGGAGAGGTGAGGCTCC
CTCCCCTGCTCCGACCCGGGCTCCTCGCCCGCCCGGACCCACAGGCCACCCTCAACCGTCCTGGCCCCGGACCCAAA
CCCCACCCCTCACTCTGCTTCTCCCCGCAGGATGTTCCTGTCCTTCCCCACCACCAAGACCTACTTCCCGCACTTCG
ACCTGAGCCACGGCTCTGCCCAGGTTAAGGGCCACGGCAAGAAGGTGGCCGACGCGCTGACCAACGCCGTGGCGCAC
GTGGACGACATGCCCAACGCGCTGTCCGCCCTGAGCGACCTGCACGCGCACAAGCTTCGGGTGGACCCGGTCAACTT
CAAGGTGAGCGGCGGGCCGGGAGCGATCTGGGTCGAGGGGCGAGATGGCGCCTTCCTCTCAGGGCAGAGGATCACGC
GGGTTGCGGGAGGTGTAGCGCAGGCGGCGGCTGCGGGCCTGGGCCGCACTGACCCTCTTCTCTGCACAGCTCCTAAG
CCACTGCCTGCTGGTGACCCTGGCCGCCCACCTCCCCGCCGAGTTCACCCCTGCGGTGCACGCCTCCCTGGACAAGT
TCCTGGCTTCTGTGAGCACCGTGCTGACCTCCAAATACCGTTAAGCTGGAGCCTCGGTAGCCGTTCCTCCTGCCCGC
TGGGCCTCCCAACGGGCCCTCCTCCCCTCCTTGCACCGGCCCTTCCTGGTCTTTGAATAAAGTCTGAGTGGGCAGCA
GCCTGTGTGTGCCTGGGTTCTCTCTATCCCGGAATGTGCCAACAATGGAGGTGTTTACCTGTCTCAGACCAAGGACC
TCTCTGCAGCTGCATGGGGCTGGGGAGGGAGAACTGCAGGGAGTATGGGAGGGGAAGCTGAGGTGGGCCTGCTCAAG
AGAAGGTGCTGAACCATCCCCTGTCCTGAGAGGTGCCAGGCCTGCAGGCAGTGGCTCAGAAGCTGGGGAGGAGAGAG
GCATCCAGGGTTCTACTCAGGGAGTCCCAGCATCGCCACCCTCCTTTGAAATCTCCCTGGTTGAACCCAGTTAACAT
ACGCTCTCCATCAAAACAAAACGAAACAAAACAAACTAGCAAAATAGGCTGTCCCCAGTGCAAGTGCAGGTGCCAGA
ACATTTCTCTCATTCCCACCCCTTCCTGCCAGAGGGTAGGTGGCTGGAGTGAGGGTGCTGGCCCTACTCACACTTCC
TGTGTCACGGTGACCCTCTGAGAGCAGCCCAGTCAGTGGGGAAGGAGGAAGGGGCTGGGATGCTCACAGCCGGCAGC
CCACACCTGGGGAGACTCTTCAGCAGAGCACCTTGCGGCCTTACTCCTGCACGTCTCCTGCAGTTTGTAAGGTGCAT
TCAGAACTCACTGTGTGCCCAGCCCTGAGCTCCCAGCTAATTGCCCCACCCAGGGCCTCTGGGACCTCCTGGTCTTC
TGCTTCCTGTGCTGCCAGCAACTTCTGGAAACGTCCCTGTCCCCGGTGCTGAAGTCCTGGAATCCATGCTGGGAAGT
TGCACAGCCCATCTGGCTCTCAGCCAGCCTAGGAACATGAGCAGCACTTCCAACCCAGTCCCTGCCCCACAGCAAGC
CTCCCCCTCCACACTCACAGTACTGGATTGAGCTTTGGGGAGGGTGGAGAGGACCCTGTCACTGCTTTCCTTCTGGA
CATGGACCTCTCTGAATTGTTGGGGAGTTCCCTCCCCTCTCCACCACCCGCTCTTCCTGCGCCTCACAGCCCAGAGC
ATTGTTATTTCAGCAGAAACACTTTAAAAAATAAACTAAAATCCGACAGGCACGGTGGCTCACGCCTGTAATCCCAG
CACTTTGGGAGGCCGAGGTGGGAGGATCACCTGAGGTCGGGAGTTTGAGACCACCCTGATCAACATGTAGAAACCCC
ATCTATACTAAAAATACAAAATCAGCCGGGCATGGTGGCCCATGCCTGTAAACCCACCTACTCCGGAGGCTGAGGCA
GGAGAATCATTTTAACCAAGGAGGCAGAGGTTGCAGTGAGCTAAGATCACACCATTGCACTCCAGCCTGGAAAACAA
CAGCGAAACTCCGCCTCAAAAAAAAAAAAGCCCCCACATCTTATCTTTTTTTTTTCCTTCAGGCTGTGGGCAGAGTC
AGAAGAGGGTGGCAGACAGGGAGGGGAAATGAGAAGATCCAACGGGGGAAGCATTGCTAAGCTGGTCGGAGCTACTT
CCTTCTCTGCCCAAGGCAGCTTACCCTGGCTTGCTCCTGGACACCCAGGGCAGGGCCTGAGTAAGGGCCTGGGGAGA
CAGGGCAGGGAGCAGGCTGAAGGGTGCTGACCTGATGCACTCCTCAAAGCAAGATCTTCTGCCAGACCCCCAGGAAA
TGACTTATCAGTGATTTCTCAGGCTGTTTTCTCCTCAGTACCATCCCCCCAAAAAACATCACTTTTCATGCACAGGG
ATGCACCCACTGGCACTCCTGCACCTCCCACCCTTCCCCAGAAGTCCACCCCTTCCTTCCTCACCCTGCAGGAGCTG
GCCAGCCTCATCACCCCAACATCTCCCCACCTCCATTCTCCAACCACAGGGCCCTTGTCTCCTCTGTCCTTTCCCCT
CCCCGAGCCAAGCCTCCTCCCTCCTCCACCTCCTCCACCTAATACATATCCTTAAGTCTCACCTCCTCCAGGAAGCC
CTCAGACTAACCCTGGTCACCTTGAATGCCTCGTCCACACCTCCAGACTTCCTCAGGGCCTGTGATGAGGTCTGCAC
CTCTGTGTGTACTTGTGTGATGGTTAGAGGACTGCCTACCTCCCAGAGGAGGTTGAATGCTCCAGCCGGTTCCAGCT
ATTGCTTTGTTTACCTGTTTAACCAGTATTTACCTAGCAAGTCTTCCATCAGATAGCATTTGGAGAGCTGGGGGTGT
CACAGTGAACCACGACCTCTAGGCCAGTGGGAGAGTCAGTCACACAAACTGTGAGTCCATGACTTGGGGCTTAGCCA
GCACCCACCACCCCACGCGCCACCCCACAACCCCGGGTAGAGGAGTCTGAATCTGGAGCCGCCCCCAGCCCAGCCCC
GTGCTTTTTGCGTCCTGGTGTTTATTCCTTCCCGGTGCCTGTCACTCAAGCACACTAGTGACTATCGCCAGAGGGAA
AGGGAGCTGCAGGAAGCGAGGCTGGAGAGCAGGAGGGGCTCTGCGCAGAAATTCTTTTGAGTTCCTATGGGCCAGGG
CGTCCGGGTGCGCGCATTCCTCTCCGCCCCAGGATTGGGCGAAGCCTCCCGGCTCGCACTCGCTCGCCCGTGTGTTC
CCCGATCCCGCTGGAGTCGATGCGCGTCCAGCGCGTGCCAGGCCGGGGCGGGGGTGCGGGCTGACTTTCTCCCTCGC
TAGGGACGCTCCGGCGCCCGAAAGGAAAGGGTGGCGCTGCGCTCCGGGGTGCACGAGCCGACAGCGCCCGACCCCAA
CGGGCCGGCCCCGCCAGCGCCGCTACCGCCCTGCCCCCGGGCGAGCGGGATGGGCGGGAGTGGAGTGGCGGGTGGAG
GGTGGAGACGTCCTGGCCCCCGCCCCGCGTGCACCCCCAGGGGAGGCCGAGCCCGCCGCCCGGCCCCGCGCAGGCCC
CGCCCGGGACTCCCCTGCGGTCCAGGCCGCGCCCCGGGCTCCGCGCCAGCCAATGAGCGCCGCCCGGCCGGGCGTGC
CCCCGCGCCCCAAGCATAAACCCTGGCGCGCTCGCGGCCCGGCACTCTTCTGGTCCCCACAGACTCAGAGAGAACCC
ACCATGGTGCTGTCTCCTGCCGACAAGACCAACGTCAAGGCCGCCTGGGGTAAGGTCGGCGCGCACGCTGGCGAGTA
TGGTGCGGAGGCCCTGGAGAGGTGAGGCTCCCTCCCCTGCTCCGACCCGGGCTCCTCGCCCGCCCGGACCCACAGGC
CACCCTCAACCGTCCTGGCCCCGGACCCAAACCCCACCCCTCACTCTGCTTCTCCCCGCAGGATGTTCCTGTCCTTC
CCCACCACCAAGACCTACTTCCCGCACTTCGACCTGAGCCACGGCTCTGCCCAGGTTAAGGGCCACGGCAAGAAGGT
GGCCGACGCGCTGACCAACGCCGTGGCGCACGTGGACGACATGCCCAACGCGCTGTCCGCCCTGAGCGACCTGCACG
CGCACAAGCTTCGGGTGGACCCGGTCAACTTCAAGGTGAGCGGCGGGCCGGGAGCGATCTGGGTCGAGGGGCGAGAT
GGCGCCTTCCTCGCAGGGCAGAGGATCACGCGGGTTGCGGGAGGTGTAGCGCAGGCGGCGGCTGCGGGCCTGGGCCC
TCGGCCCCACTGACCCTCTTCTCTGCACAGCTCCTAAGCCACTGCCTGCTGGTGACCCTGGCCGCCCACCTCCCCGC
CGAGTTCACCCCTGCGGTGCACGCCTCCCTGGACAAGTTCCTGGCTTCTGTGAGCACCGTGCTGACCTCCAAATACC
GTTAAGCTGGAGCCTCGGTGGCCATGCTTCTTGCCCCTTGGGCCTCCCCCCAGCCCCTCCTCCCCTTCCTGCACCCG
TACCCCCGTGGTCTTTGAATAAAGTCTGAGTGGGCGGCAGCCTGTGTGTGCCTGAGTTTTTTCCCTCAGCAAACGTG
CCAGGCATGGGCGTGGACAGCAGCTGGGACACACATGGCTAGAACCTCTCTGCAGCTGGATAGGGTAGGAAAAGGCA
GGGGCGGGAGGAGGGGATGGAGGAGGGAAAGTGGAGCCACCGCGAAGTCCAGCTGGAAAAACGCTGGACCCTAGAGT
GCTTTGAGGATGCATTTGCTCTTTCCCGAGTTTTATTCCCAGACTTTTCAGATTCAATGCAGGTTTGCTGAAATAAT
GAATTTATCCATCTTTACGTTTCTGGGCACTCTTGTGCCAAGAACTGGCTGGCTTTCTGCCTGGGACGTCACTGGTT
TCCCAGAGGTCCTCCCACATATGGGTGGTGGGTAGGTCAGAGAAGTCCCACTCCAGCATGGCTGCATTGATCCCCCA
TCGTTCCCACTAGTCTCCGTAAAACCTCCCAGATACAGGCACAGTCTAGATGAAATCAGGGGTGCGGGGTGCAACTG
CAGGCCCCAGGCAATTCAATAGGGGCTCTACTTTCACCCCCAGGTCACCCCAGAATGCTCACACACCAGACACTGAC
GCCCTGGGGCTGTCAAGATCAGGCGTTTGTCTCTGGGCCCAGCTCAGGGCCCAGCTCAGCACCCACTCAGCTCCCCT
GAGGCTGGGGAGCCTGTCCCATTGCGACTGGAGAGGAGAGCGGGGCCACAGAGGCCTGGCTAGAAGGTCCCTTCTCC
CTGGTGTGTGTTTTCTCTCTGCTGAGCAGGCTTGCAGTGCCTGGGGTATCAGAGGGAGGGTTCCCGGAGCTGGTAGC
CATAAAGCCCTGGCCCTCAACTGATAGGAATATCTTTTATTCCCTGAGCCCATGAATCACCCTTGGTAAACACCTAT
GGCAGGCCCTCTGCCTGCGTTTGTGATGTCCTTCCCGCAGCCTGTGGGTACAGTATCAACTGTCAGGAAGACGGTGT
CTTCGTTATTTCATCAGGAAGAATGGAGGTCTGACCTAAAGGTAGAAATATGTCAAATGTACAGCAGAGGGCTGGTT
GGAGTGCAGCGCTTTTTACAATTAATTGATCAGAACCAGTTATAAATTTATCATTTCCTTCTCCACTCCTGCTGCTT
CAGTTGACTAAGCCTAAGAAAAAATTATAAAAATTGGCCGGGCGCGGTGGCTCACACCTGTAATTGCAGCACTTTGC
CAGGCTTAGGCAGGTGGATCACCTGAAGTCAGGGGTTCGAGACCAGCCTAGCCAACATAGTGAAACCCTGTCTCTAC
TAAAAAGACAAAAATTGTCCAGGTGTGATGACTCATGCCTGTAAACCTGGCACTTTGGGAGGCGGAGGTTGTAGTGA
GTCAAGATCGCGCCATCGCACTCCAGCTTGGGCAACAAGAGCGAAACTCTGTCTCAAAAAAAAATTTAATCTAATTT
AATTTAATTTAAAAATTAGCACGGTGGTTGGGCACAGTGGCTCACGCCTGTAATCCCAGCACTTTGGGAAGCCAAGG
TGGGCAGATCACAAGGTCAGGAATTCGAGACCAGCCTGGCCAATATGGGGAAACCCCATCTCTACTAAAAATACAAA
AAATTAGCCGGGTGTGGTGGCGCACGCCTGTAATCCCAGCTACTCGGGAGGTTGAGGTAGGAGAATCACTTGAACCC
AGGAGGCAGAGGTTGCAGTGACCCGAGATCACACCATTGCACTCTAGCCTGGGCAACAAGAGCAAAACTCCATCTCA
AAAAAAATTATAAAAATTATACATCAGTAGATGAATGGGTAAACAAAATGTGGTGGTCTATACACACAATGGAATAT
TATTTGGCCACAAAAAGAAATGAAGCACTGATAGGATGTAGCTGCACCCTGAAAATATTTGACAAGTAAAAGAAGCC
GGACACCAAAGGTCACAAACTGCATGACCCCATCTATATGCAATATCCGCTACAGCCAAATCCATAGGGACCAAAAG
CGGATTAGTGGCTGCCGGGGCCAGAGTTACTGTTAATGAGTACCGAGGTGGCGTTTGGGATGATGAAAAAGTTCTGA
CCTAGATAGTGGTGATGGCTGCATAACACTAAGTGTTCTTAATATCACCAAATTTTATACCTGAAAAATGGCTACAA
TGGTAATTTATGTCTATTTTATCACCTTTTTTAAAACAAAAAAGATATAAGGGGTACAGCAGAGTGAGTGCTGCATA
TGCATTTACTATTATTCTTGGGTTACATCCCAGGTACTCAATAAATGTTCACTGCCCTGAAGAAACACCTGCTACGA
GTCAGGCACCTCACAGTTGTTATCCGTTTAATTCTCACAATCTGAGAAGAAACTGTCACCCTCATTTTATATAATAA
ATGAGAAAACAGACTCGGGCAAGTGTCACAATAGAATCAAGAGGCAGAATAAACTGACTTCCAATGCCAAATCCATG
CCGAAATTCAGTGCTATAATAATGTACATGGCCGGGCGCGGTGGTTCACGCCTGTAATCCCAGAACTTTGGGAGGCT
GAGGCGGGAGGATCACCTGAGGTCGGGAGTTTGAGATCAGCCTAACACGGTGAAACCCTGTCTCTACTAAAAATACA
AAATTGGCATGGTGGCATGCACCTGTGATCCCAGTTACTCGGGAGGCTGAGGCAGGAGAATCGTTTGAACCCGGGAG
GCGGAGGTTGCAGTGAGCCGGAATGGCGCCACTGCACTCACCGCACCCGGCCAATTTTTGTGTTTTTAGTAGAGACT
AAATACCATATAGTGAACACCTAAGACGGGGGGCCTTGGATCCAGGGCGATTCAGAGGGCCCCGGTCGGAGCTGTCG
GAGATTGAGCGCGCGCGGTCCCGGGATCTCCGACGAGGCCCTGGACCCCCGGGCGGCGAAGCTGCGGCGCGGCGCCC
CCTGGAGGCCGCGGGACCCCTGGCCGGTCCGCGCAGGCGCAGCGGGGTCGCAGGGCGCGGCGGGTTCCAGCGCGGGG
ATGGCGCTGTCCGCGGAGGACCGGGCGCTGGTGCGCGCCCTGTGGAAGAAGCTGGGCAGCAACGTCGGCGTCTACAC
GACAGAGGCCCTGGAAAGGTGCGGCAGGCTGGGCGCCCCCGCCCCCAGGGGCCCTCCCTCCCCAAGCCCCCCGGACG
CGCCTCACCCACGTTCCTCTCGCAGGACCTTCCTGGCTTTCCCCGCCACGAAGACCTACTTCTCCCACCTGGACCTG
AGCCCCGGCTCCTCACAAGTCAGAGCCCACGGCCAGAAGGTGGCGGACGCGCTGAGCCTCGCCGTGGAGCGCCTGGA
CGACCTACCCCACGCGCTGTCCGCGCTGAGCCACCTGCACGCGTGCCAGCTGCGAGTGGACCCGGCCAGCTTCCAGG
TGAGCGGCTGCCGTGCTGGGCCCCTGTCCCCGGGAGGGCCCCGGCGGGGTGGGTGCGGGGGGCGTGCGGGGCGGGTG
CAGGCGAGTGAGCCTTGAGCGCTCGCCGCAGCTCCTGGGCCACTGCCTGCTGGTAACCCTCGCCCGGCACTACCCCG
GAGACTTCAGCCCCGCGCTGCAGGCGTCGCTGGACAAGTTCCTGAGCCACGTTATCTCGGCGCTGGTTTCCGAGTAC
CGCTGAACTGTGGGTGGGTGGCCGCGGGATCCCCAGGCGACCTTCCCCGTGTTTGAGTAAAGCCTCTCCCAGGAGCA
GCCTTCTTGCCGTGCTCTCTCGAGGTCAGGACGCGAGAGGAAGGCGCCGCCCCTCCCCAAGGAAAGGCGAGGGCCTG
GGGCACACCCCCAGTGCCCAGATCCAGGCGCGCCTCTTTCCACCTCCAGCAGGTTTGGGGCCTCGGCCATGGGGGCA
CCGAACTGCGTGCAGCCTGACCCTCCCGAATGGGGTGGTAGGTGAGGGCCGCGGGACGCCCCGGGCGGCGGGCTGCG
AGGACGGCCGACTCTGCCCATCCCGAGGGCGGCTGGCTTCGCCCTCCCCACTCTGCGCCGAGCACGCGGCCCGGACC
CACCGCGAGAACTCCGCACCTGCAGCGTGAACGCACGCGGGCGGCGTTAAGGGCCCGGGGCTGACTCGGAGCAGGTT
AGGGAACAGCGCCCCCTCCCGGCGCGAGCCGGTACCTGCGCAGCACCCAGCCGCCGCGGCTGTGGCCTGGAATCGGG
GACCTGGGGTGCCGGGGGGTTGTGGTGAAGGAGGTGGGACCAGCCCCAGCACCTAGCCACGTAGCTGGCGAGGTGGA
CCAGGAACCGACCCAGACCCCTGCCGTCACCCGACATCACTACGGAGAGTGAAGCTTTTTTATATTTGTCCACATAA
AACCAATCATGGTCATTGTAGAACTTCCGAAAACAAGGCTTGCTGCACCTTCCTGTGTATCCCAGGTCCAGGAATGG
GTGCAGCACATCCTTCAGCTGCCGCTTGACACGCGGCAAACTGTGTCATGTGTAAACAAGAACAGGACATGGCTGTC
ATATCCAAGAGCACATGTGTAACACAGACATGCCACACACACACACACACACACACGGGGTAGAGGCAGGCCTCATC
CACACCCCTAACATTTGATGCGTAGCTGTTCCAGTCTTCTAGGCACATGTAGAGATGCTTTTCCTCAGAAATGGTAT
TCTCAAGGTGACACTGAGGAAAAGTGGACAGGCCGGGCGCGGTGGCTCACGCCTGTAATCCCAGCACTCCGGGAGGC
CGAGGCGGGCGGATC

GenBank Accession No. NM_000517 (SEQ ID NO: 247)

ACTCTTCTGGTCCCCACAGACTCAGAGAGAACCCACCATGGTGCTGTCT
CCTGCCGACAAGACCAACGTCAAGGCCGCCTGGGGTAAGGTCGGCGCGC
ACGCTGGCGAGTATGGTGCGGAGGCCCTGGAGAGGATGTTCCTGTCCTT
CCCCACCACCAAGACCTACTTCCCGCACTTCGACCTGAGCCACGGCTCT
GCCCAGGTTAAGGGCCACGGCAAGAAGGTGGCCGACGCGCTGACCAACG
CCGTGGCGCACGTGGACGACATGCCCAACGCGCTGTCCGCCCTGAGCGA
CCTGCACGCGCACAAGCTTCGGGTGGACCCGGTCAACTTCAAGCTCCTA
AGCCACTGCCTGCTGGTGACCCTGGCCGCCCACCTCCCCGCCGAGTTCA
CCCCTGCGGTGCACGCCTCCCTGGACAAGTTCCTGGCTTCTGTGAGCAC
CGTGCTGACCTCCAAATACCGTTAAGCTGGAGCCTCGGTAGCCGTTCCT
CCTGCCCGCTGGGCCTCCCAACGGGCCCTCCTCCCCTCCTTGCACCGGC
CCTTCCTGGTCTTTGAATAAAGTCTGAGTGGGCAGCA

GenBank Accession No. J00179 (SEQ ID NO: 248)

GAATTCTAATCTCCCTCTCAACCCTACAGTCACCCATTTGGTATATTAAAGATGTGTTGTCTACTGTCTAGTATCCC
TCAAGTAGTGTCAGGAATTAGTCATTTAAATAGTCTGCAAGCCAGGAGTGGTGGCTCATGTCTGTAATTCCAGCACT
GGAGAGGTAGAAGTGGGAGGACTGCTTGAGCTCAAGAGTTTGATATTATCCTGGACAACATAGCAAGACCTCGTCTC
TACTTAAAAAAAAAAAAATTAGCCAGGCATGTGATGTACACCTGTAGTCCCAGCTACTCAGGAGGCCGAAATGGGAG
GATCCCTTGAGCTCAGGAGGTCAAGGCTGCAGTGAGACATGATCTTGCCACTGCACTCCAGCCTGGACAGCAGAGTG
AAACCTTGCCTCACGAAACAGAATACAAAAACAAACAAACAAAAAACTGCTCCGCAATGCGCTTCCTTGATGCTCTA
CCACATAGGTCTGGGTACTTTGTACACATTATCTCATTGCTGTTCGTAATTGTTAGATTAATTTTGTAATATTGATA
TTATTCCTAGAAAGCTGAGGCCTCAAGATGATAACTTTTATTTTCTGGACTTGTAATAGCTTTCTCTTGTATTCACC
ATGTTGTAACTTTCTTAGAGTAGTAACAATATAAAGTTATTGTGAGTTTTTGCAAACACAGCAAACACAACGACCCA
TATAGACATTGATGTGAAATTGTCTATTGTCAATTTATGGGAAAACAAGTATGTACTTTTTCTACTAAGCCATTGAA
ACAGGAATAACAGAACAAGATTGAAAGAATACATTTTCCGAAATTACTTGAGTATTATACAAAGACAAGCACGTGGA
CCTGGGAGGAGGGTTATTGTCCATGACTGGTGTGTGGAGACAAATGCAGGTTTATAATAGATGGGATGGCATCTAGC
GCAATGACTTTGCCATCACTTTTAGAGAGCTCTTGGGGACCCCAGTACACAAGAGGGGACGCAGGGTATATGTAGAC
ATCTCATTCTTTTTCTTAGTGTGAGAATAAGAATAGCCATGACCTGAGTTTATAGACAATGAGCCCTTTTCTCTCTC
CCACTCAGCAGCTATGAGATGGCTTGCCCTGCCTCTCTACTAGGCTGACTCACTCCAAGGCCCAGCAATGGGCAGGG
CTCTGTCAGGGCTTTGATAGCACTATCTGCAGAGCCAGGGCCGAGAAGGGGTGGACTCCAGAGACTCTCCCTCCCAT
TCCCGAGCAGGGTTTGCTTATTTATGCATTTAAATGATATATTTATTTTAAAAGAAATAACAGGAGACTGCCCAGCC
CTGGCTGTGACATGGAAACTATGTAGAATATTTTGGGTTCCATTTTTTTTTCCTTCTTTCAGTTAGAGGAAAAGGGG
CTCACTGCACATACACTAGACAGAAAGTCAGGAGCTTTGAATCCAAGCCTGATCATTTCCATGTCATACTGAGAAAG
TCCCCACCCTTCTCTGAGCCTCAGTTTCTCTTTTTATAAGTAGGAGTCTGGAGTAAATGATTTCCAATGGCTCTCAT
TTCAATACAAAATTTCCGTTTATTAAATGCATGAGCTTCTGTTACTCCAAGACTGAGAAGGAAATTGAACCTGAGAC
TCATTGACTGGCAAGATGTCCCCAGAGGCTCTCATTCAGCAATAAAATTCTCACCTTCACCCAGGCCCACTGAGTGT
CAGATTTGCATGCACTAGTTCACGTGTGTAAAAAGGAGGATGCTTCTTTCCTTTGTATTCTCACATACCTTTAGGAA
AGAACTTAGCACCCTTCCCACACAGCCATCCCAATAACTCATTTCAGTGACTCAACCCTTGACTTTATAAAAGTCTT
GGGCAGTATAGAGCAGAGATTAAGAGTACAGATGCTGGAGCCAGACCACCTGAGTGATTAGTGACTCAGTTTCTCTT
AGTAATTGTATGACTCAGTTTCTTCATCTGTAAAATGGAGGGTTTTTTAATTAGTTTGTTTTTGAGAAAGGGTCTCA
CTCTGTCACCCAAATGGGAGTGTAGTGGCAAAATCTCGGCTCACTGCAACTTGCACTTCCCAGGCTCAAGCGGTCCT
CCCACCTCAACATCCTGAGTAGCTGGAACCACAGGTACACACCACCATACCTCGCTAATTTTTTGTATTTTTGGTAG
AGATGGGGTTTCACATGTTACACAGGATGGTCTCAGACTCCGGAGCTCAAGCAATCTGCCCACCTCAGCCTTCCAAA
GTGCTGGGATTATAAGCATGATTACAGGAGTTTTAACAGGCTCATAAGATTGTTCTGCAGCCCGAGTGAGTTAATAC
ATGCAAAGAGTTTAAAGCAGTGACTTATAAATGCTAACTACTCTAGAAATGTTTGCTAGTATTTTTTGTTTAACTGC
AATCATTCTTGCTGCAGGTGAAAACTAGTGTTCTGTACTTTATGCCCATTCATCTTTAACTGTAATAATAAAAATAA
CTGACATTTATTGAAGGCTATCAGAGACTGTAATTAGTGCTTTGCATAATTAATCATATTTAATACTCTTGGATTCT
TTCAGGTAGATACTATTATTATCCCCATTTTACTACAGTTAAAAAAACTACCTCTCAACTTGCTCAAGCATACACTC
TCACACACACAAACATAAACTACTAGCAAATAGTAGAATTGAGATTTGGTCCTAATTATGTCTTTGCTCACTATCCA
ATAAATATTTATTGACATGTACTTCTTGGCAGTCTGTATGCTGGATGCTGGGGATACAAAGATGTTTAAATTTAAGC
TCCAGTCTCTGCTTCCAAAGGCCTCCCAGGCCAAGTTATCCATTCAGAAAGCATTTTTTACTCTTTGCATTCCACTG
TTTTTCCTAAGTGACTAAAAAATTACACTTTATTCGTCTGTGTCCTGCTCTGGGATGATAGTCTGACTTTCCTAACC
TGAGCCTAACATCCCTGACATCAGGAAAGACTACACCATGTGGAGAAGGGGTGGTGGTTTTGATTGCTGCTGTCTTC
AGTTAGATGGTTAACTTTGTGAAGTTGAAAACTGTGGCTCTCTGGTTGACTGTTAGAGTTCTGGCACTTGTCACTAT
GCCTATTATTTAACAAATGCATGAATGCTTCAGAATATGGGAATATTATCTTCTGGAATAGGGAATCAAGTTATATT
ATGTAACCCAGGATTAGAAGATTCTTCTGTGTGTAAGAATTTCATAAACATTAAGCTGTCTAGCAAAAGCAAGGGCT
TGGAAAATCTGTGAGCTCCTCACCATATAGAAAGCTTTTAACCCATCATTGAATAAATCCCTATAGGGGATTICTAC
CCTGAGCAAAAGGCTGGTCTTGATTAATTCCCAAACTCATATAGCTCTGAGAAAGTCTATGCTGTTAACGTTTTCTT
GTCTGCTACCCCATCATATGCACAACAATAAATGCAGGCCTAGGCATGACTGAAGGCTCTCTCATAATTCTTGGTTG
CATGAATCAGATTATCAACAGAAATGTTGAGACAAACTATGGGGAAGCAGGGTATGAAAGAGCTCTGAATGAAATGG
AAACCGCAATGCTTCCTGCCCATTCAGGGCTCCAGCATGTAGAAATCTGGGGCTTTGTGAAGACTGGCTTAAAATCA
GAAGCCCCATTGGATAAGAGTAGGGAAGAACCTAGAGCCTACGCTGAGCAGGTTTCCTTCATGTGACAGGGAGCCTC
CTGCCCCGAACTTCCAGGGATCCTCTCTTAAGTGTTTCCTGCTGGAATCTCCTCACTTCTATCTGGAAATGGTTTCT
CCACAGTCCAGCCCCTGGCTAGTTGAAAGAGTTACCCATGCAGAGGCCCTCCTAGCATCCAGAGACTAGTGCTTAGA
TTCCTACTTTCAGCGTTGGACAACCTGGATCCACTTGCCCAGTGTTCTTCCTTAGTTCCTACCTTCGACCTTGATCC
TCCTTTATCTTCCTGAACCCTGCTGAGATGATCTATGTGGGGAGAATGGCTTCTTTGAGAAACATCTTCTTCGTTAG
TGGCCTGCCCCTCATTCCCACTTTAATATCCAGAATCACTATAAGAAGAATATAATAAGAGGAATAACTCTTATTAT
AGGTAAGGGAAAATTAAGAGGCATACGTGATGGGATGAGTAAGAGAGGAGAGGGAAGGATTAATGGATGATAAAATC
TACTACTATTTGTTGAGACCTTTTATAGTCTAATCAATTTTGCTATTGTTTTCCATCCTCACGCTAACTCCATAAAA
AAACACTATTATTATCTTTATTTTGCCATGACAAGACTGAGCTCAGAAGAGTCAAGCATTTGCCTAAGGTCGGACAT
GTCAGAGGCAGTGCCAGACCTATGTGAGACTCTGCAGCTACTGCTCATGGGCCCTGTGCTGCACTGATGAGGAGGAT
CAGATGGATGGGGCAATGAAGCAAAGGAATCATTCTGTGGATAAAGGAGACAGCCATGAAGAAGTCTATGACTGTAA
ATTTGGGAGCAGGAGTCTCTAAGGACTTGGATTTCAAGGAATTTTGACTCAGCAAACACAAGACCCTCACGGTGACT
TTGCGAGCTGGTGTGCCAGATGTGTCTATCAGAGGTTCCAGGGAGGGTGGGGTGGGGTCAGGGCTGGCCACCAGCTA
TCAGGGCCCAGATGGGTTATAGGCTGGCAGGCTCAGATAGGTGGTTAGGTCAGGTTGGTGGTGCTGGGTGGAGTCCA
TGACTCCCAGGAGCCAGGAGAGATAGACCATGAGTAGAGGGCAGACATGGGAAAGGTGGGGGAGGCACAGCATAGCA
GCATTTTTCATTCTACTACTACATGGGACTGCTCCCCTATACCCCCAGCTAGGGGCAAGTGCCTTGACTCCTATGTT
TTCAGGATCATCATCTATAAAGTAAGAGTAATAATTGTGTCTATCTCATAGGGTTATTATGAGGATCAAAGGAGATG
CACACTCTCTGGACCAGTGGCCTAACAGTTCAGGACAGAGCTATGGGCTTCCTATGTATGGGTCAGTGGTCTCAATG
TAGCAGGCAAGTTCCAGAAGATAGCATCAACCACTGTTAGAGATATACTGCCAGTCTCAGAGCCTGATGTTAATTTA
GCAATGGGCTGGGACCCTCCTCCAGTAGAACCTTCTAACCAGCTGCTGCAGTCAAAGTCGAATGCAGCTGGTTAGAC
TTTTTTTAATGAAAGCTTAGCTTTCATTAAAGATTAAGCTCCTAAGCAGGGCACAGATGAAATTGTCTAACAGCAAC
TTTGCCATCTAAAAAAATCTGACTTCACTGGAAACATGGAAGCCCAAGGTTCTGAACATGAGAAATTTTTAGGAATC
TGCACAGGAGTTGAGAGGGAAACAAGATGGTGAAGGGACTAGAAACCACATGAGAGACACGAGGAAATAGTGTAGAT
TTAGGCTGGAGGTAAATGAAAGAGAAGTGGGAATTAATACTTACTGAAATCTTTCTATATGTCAGGTGCCATTTTAT
GATATTTAATAATCTCATTACATATGGTAATTCTGTGAGATATGTATTATTGAACATACTATAATTAATACTAATGA
TAAGTAACACCTCTTGAGTACTTAGTATATGCTAGAATCAAATTTAAGTTTATCATATGAGGCCGGGCACGGTGGCT
CATATATGGGATTACATGCCTGTAATCCCAGCACTTTGGGAGGCCAAGGCAATTGGATCACCTGAGGTCAGGAGTTC
CAGACCAGCCTGGCCAACATGGTGAAACCCCTTCTCTACTAAAAAATACAAAAAATCAGCCAGGTGTGGTGGCACGC
GTCTATAATCCCAGCTACTCAGGAGGCTGAGGCAGGAGAATCACTTGAACCCAGGAGGTGGAGGTTGCAGTGAGCTA
AGATTGCACCACTGCACTCCAGCCTAGGCGACAGAGTGAGACTCCATCTCAAAAAAAAAAAAAGAAGTTTATTATAT
GAATTAACTTAGTTTTACTCACACCAATACTCAGAAGTAGATTATTACCTCATTTATTGATGAGGAGCCCAATGTAC
TTGTAGTGTAGATCAACTTATTGAAAGCACAAGCTAATAAGTAGACAATTAGTAATTAGAAGTCAGATGGTCTGAGC
TCTCCTACTGTCTACATTACATGAGCTCTTATTAACTGGGGACTCGAAAATCAAAGACATGAAATAATTTGTCCAAG
CTTACAGAACCACCAAGTAGTAAGGCTAGGATGTAGACCCAGTTCTGCTACCTCTGAAGACAGTGTTTTTTCCACAG
CAAAACACAAACTCAGATATTGTGGATGCGAGAAATTAGAAGTAGATATTCCTGCCCTGTGGCCCTTGCTTCTTACT
TTTACTTCTTGGCGATTGGAAGTIGTGGTCCAAGCCACAGTTGCAGACCATACTTCCTCAACCATAATTGCATTTCT
TCAGGAAAGTTTGAGGGAGAAAAAGGTAAAGAAAAATTTAGAAACAACTTCAGAATAAAGAGATTTTCTCTTGGGTT
ACAGAGATTGTCATATGACAAATTATAAGCAGACACTTGAGAAAACTGAAGGCCCATGCCTGCCCAAATTACCCTTT
GACCCCTTGGTCAAGCTGCAACTTTGGTTAAAGGGAGTGTTTATGTGTTATAGTGTTCATTTACTCTTCTGGTCTAA
CCCATTGGCTCCGTCTTCATCCTGCAGTGACCTCAGTGCCTCAGAAACATACATATGTTTGTCTAGTTTAAGTTTGT
GTGAAATTCTAACTAGCGTCAAGAACTGAGGGCCCTAAACTATGCTAGGAATAGTGCTGTGGTGCTGTGATAGGTAC
ACAAGAAATGAGAAGAAACTGCAGATTCTCTGCATCTCCCTTTGCCGGGTCTGACAACAAAGTTTCCCCAAATTTTA
CCAATGCAAGCCATTTCTCCATATGCTAACTACTTTAAAATCATTTGGGGCTTCACATTGTCTTTCTCATCTGTAAA
AAGAATGGAAGAACTCATTCCTACAGAACTCCCTATGTCTTCCCTGATGGGCTAGAGTTCCTCTTTCTCAAAAATTA
GCCATTATTGTATTTCCTTCTAAGCCAAAGCTCAGAGGTCTTGTATTGCCCAGTGACATGCACACTGGTCAAAAGTA
GGCTAAGTAGAAGGGTACTTTCACAGGAACAGAGAGCAAAAGAGGTGGGTGAATGAGAGGGTAAGTGAGAAAAGACA
AATGAGAAGTTACAACATGATGGCTTGTTGTCTAAATATCTCCTAGGGAATTATTGTGAGAGGTCTGAATAGTGTTG
TAAAATAAGCTGAATCTGCTGCCTAACATTAACAGTCAAGAAATACCTCCGAATAACTGTACCTCCAATTATTCTTT
AAGGTAGCATGCAACTGTAATAGTTGCATGTATATATTTATCATAATACTGTAACAGAAAACACTTACTGAATATAT
ACTGTGTCCCTAGTTCTTTACACAATAAACTAATCTCATCCTCATAATTCTATTAGCTAATACATATTATCATCCTA
TATTTCAGAGACTTCAAGAAGTTAAGCAACTTGCTCAAGATCATCTAAGAAGTAGGTGGTATTTCTGGGCTCATTTG
GCCCCTCCTAATCTCTCATGGCAACATGGCTGCCTAAAGTGTTGATTGCCTTAATTCATCAGGGATGGGCTCATACT
CACTGCAGACCTTAACTGGCATCCTCTTTTCTTATGTGATCTGCCTGACCCTAGTAGAACTTATGAAATTTCTGATG
AGAAAGGAGAGAGGAGAAAGGCAGAGCTGACTGTGATGAGTGATGAAGGTGCCTTCTCATCTGGGTACCAGTGGGGC
CTCTAAGACTAAGTCACTCTGTCTCACTGTGTCTTAGCCAGTTCCTTACAGCTTGCCCTGATGGGAGATAGAGAATG
GGTATCCTCCAACAAAAAAATAAATTTTCATTTCTCAAGGTCCAACTTATGTTTTCTTAATTTTTAAAAAAATCTTG
ACCATTCTCCACTCTCTAAAATAATCCACAGTGAGAGAAACATTCTTTTCCCCCATCCCATAAATACCTCTATTAAA
TATGGAAAATCTGGGCATGGTGTCTCACACCTGTAATCCCAGCACTTTGGGAGGCTGAGGTGGGTGGACTGCTTGGA
GCTCAGGAGTTCAAGACCATCTTGGACAACATGGTGATACCCTGCCTCTACAAAAAGTACAAAAATTAGCCTGGCAT
GGTGGTGTGCACCTGTAATCCCAGCTATTAGGGTGGCTGAGGCAGGAGAATTGCTTGAACCCGGGAGGCGGAGGTTG
CAGTGAGCTGAGATCGTGCCACTGCACTCCAGCCTGGGGGACAGAGCACATTATAATTAACTGTTATTTTTTACTTG
GACTCTTGTGGGGAATAAGATACATGTTTTATTCTTATTTATGATTCAAGCACTGAAAATAGTGTTTAGCATCCAGC
AGGTGCTTCAAAACCATTTGCTGAATGATTACTATACTTTTTACAAGCTCAGCTCCCTCTATCCCTTCCAGCATCCT
CATCTCTGATTAAATAAGCTTCAGTTTTTCCTTAGTTCCTGTTACATTTCTGTGTGTCTCCATTAGTGACCTCCCAT
AGTCCAAGCATGAGCAGTTCTGGCCAGGCCCCTGTCGGGGTCAGTGCCCCACCCCCGCCTTCTGGTTCTGTGTAACC
TTCTAAGCAAACCTTCTGGCTCAAGCACAGCAATGCTGAGTCATGATGAGTCATGCTGAGGCTTAGGGTGTGTGCCC
AGATGTTCTCAGCCTAGAGTGATGACTCCTATCTGGGTCCCCAGCAGGATGCTTACAGGGCAGATGGCAAAAAAAAG
GAGAAGCTGACCACCTGACTAAAACTCCACCTCAAACGGCATCATAAAGAAAATGGATGCCTGAGACAGAATGTGAC
ATATTCTAGAATATATTATTTCCTGAATATATATATATATATATATACACATATACGTATATATATATATATATATA
TATTTGTTGTTATCAATTGCCATAGAATGATTAGTTATTGTGAATCAAATATTTATCTTGCAGGTGGCCTCTATACC
TAGAAGCGGCAGAATCAGGCTTTATTAATACATGTGTATAGATTTTTAGGATCTATACACATGTATTAATATGAAAC
AAGGATATGGAAGAGGAAGGCATGAAAACAGGAAAAGAAAACAAACCTTGTTTGCCATTTTAAGGCACCCCTGGACA
GCTAGGTGGCAAAAGGCCTGTGCTGTTAGAGGACACATGCTCACATACGGGGTCAGATCTGACTTGGGGTGCTACTG
GGAAGCTCTCATCTTAAGGATACATCTCAGGCCAGTCTTGGTGCATTAGGAAGATGTAGGCAACTCTGATCCTGAGA
GGAAAGAAACATTCCTCCAGGAGAGCTAAAAGGGTTCACCTGTGTGGGTAACTGTGAAGGACTACAAGAGGATGAAA
AACAATGACAGACAGACATAATGCTTGTGGGAGAAAAAACAGGAGGTCAAGGGGATAGAGAAGGCTTCCAGAAGAAT
GGCTTTGAAGCTGGCTTCTGTAGGAGTTCACAGTGGCAAAGATGTTTCAGAAATGTGACATGACTTAAGGAACTATA
CAAAAAGGAACAAATTTAAGGAGAGGCAGATAAATTAGTTCAACAGACATGCAAGGAATTTTCAGATGAATGTTATG
TCTCCACTGAGCTTCTTGAGGTTAGCAGCTGTGAGGGTTTTGCAGGCCCAGGACCCATTACAGGACCTCACGTATAC
TTGACACTGTTTTTTGTATTCATTTGTGAATGAATGACCTCTTGTCAGTCTACTCGGTTTCGCTGTGAATGAATGAT
GTCTTGTCAGCCTACTTGGTTTCGCTAAGAGCACAGAGAGAAGATTTAGTGATGCTATGTAAAAACTTCCTTTTTGG
TTCAAGTGTATGTTTGTGATAGAAATGAAGACAGGCTACATGATGCATATCTAACATAAACACAAACATTAAGAAAG
GAAATCAACCTGAAGAGTATTTATACAGATAACAAAATACAGAGAGTGAGTTAAATGTGTAATAACTGTGGCACAGG
CTGGAATATGAGCCATTTAAATCACAAATTAATTAGAAAAAAAACAGTGGGGAAAAAATTCCATGGATGGGTCTAGA
AAGACTAGCATTGTTTTAGGTTGAGTGGCAGTGTTTAAAGGGTGATATCAGACTAAACTTGAAATATGTGGCTAAAT
AACTAGAATACTCTTTATTTTTTCGTATCATGAATAGCAGATATAGCTTGATGGCCCCATGCTTGGTTTAACATCCT
TGCTGTTCCTGACATGAAATCCTTAATTTTTGACAAAGGGGCTATTCATTTTCATTTTATATTGGGCCTAGAAATTA
TGTAGATGGTCCTGAGGAAAAGTTTATAGCTTGTCTATTTCTCTCTCTAACATAGTTGTCAGCACAATGCCTAGGCT
ATAGGAAGTACTCAAAGCTTGTTAAATTGAATTCTATCCTTCTTATTCAATTCTACACATGGAGGAAAAACTCATCA
GGGATGGAGGCACGCCTCTAAGGAAGGCAGGTGTGGCTCTGCAGTGTGATTGGGTACTTGCAGGACGAAGGGTGGGG
TGGGAGTGGCTAACCTTCCATTCCTAGTGCAGAGGTCACAGCCTAAACATCAAATTCCTTGAGGTGCGGTGGCTCAC
TCCTGTAATCACAGCAGTTTGGGACGCCAAGGTGGGCAGATCACTTGAGGTCAGGAGTTGGACACCAGCCCAGCCAA
CATAGTGAAACCTGGTCTCTGCTTAAAAATATAAAAATTAGCTGGACGTGGTGACGGGAGCCTGTAATCCAACTACT
TGGGAGGCTGAGGCAGGAGAATCGCTTGAACCGGGGAGGTGGAGTTTGCACTGAGCAGAGATCATGCCATTGCACTC
CAGCCTCCAGAGCGAGACTCTGTCTAAAGAAAAACGAAAACAAACAAACAAACAAACAAACAAAACCCATCAAATTC
CCTGACCGAACAGAATTCTGTCTGATTGTTCTCTGACTTATCTACCATTTTCCCTCCTTAAAGAAACTGTGGAACTT
CCTTCAGCTAGAGGGGCCTGGCTCAGAAGCCTCTGGTCAGCATCCAAGAAATACTTGATGTCACTTTGGCTAAAGGT
ATGATGTGTAGACAAGCTCCAGAGATGGTTTCTCATTTCCATATCCACCCACCCAGCTTTCCAATTTTAAAGCCAAT
TCTGAGGTAGAGACTGTGATGAACAAACACCTTGACAAAATTCAACCCAAAGACTCACTTTGCCTAGCTTCAAAATC
CTTACTCTGACATATACTCACAGCCAGAAATTAGCATGCACTAGAGTGTGCATGAGTGCAACACACACACACACCAA
TTCCATATTCTCTGTCAGAAAATCCTGTTGGTTTTTCGTGAAAGGATGTTTTCAGAGGCTGACCCCTTGCCTTCACC
TCCAATGCTACCACTCTGGTCTAAGTCACTGTCACCACCACCTAAATTATAGCTGTTGACTCATAACAATCTTCCTG
CTTCTACCACTGCCCCACTACAATTTCTTCCCAATATACTATCCAAATTAGTCTTTTCAAAATGTAAGTCATATATG
GTCACCTCTTTGTTCAAAGTCTTCTGATAGTTTCCTATATCATTTATAATAAAACCAAATCCTTACAATTCTCTACA
ATAGTTGTTCATGCATATATTATGTTTATTACAGATACGCATATATATAGCTCTCATATAAATAAATATATATATTT
ATGTGTATGTGTGTAGAGTGTTTTTTCTTACAACTCTATGATGTAGGTATTATTAGTGTCCCAAATTTTATAATTTA
GGACTTCTATGATCTCATCTTTTATTCTCCCCTTCACCGAATCTCATCCTACATTGGCCTTATTGATATTCCTTGAA
AATTCTAAGCATCTTACATCTTTAGGGTATTTACATTTGCCATTCCCTATGCCCTAAATATTTAATCATAGTTTCAT
ATAAATGGGTTCCTCATCATCTATGGGTACTCTCTCAGGTGTTAACTTTATAGTGAGGACTTTCCTGCCATACTACT
TAAAGTAGCGATACCCTTTCACCCTGTCCTAATCACACTCTGGCCTTCATTTCAGTTTTTTTTTTTTCTCCATAGCA
CCTAATCTCATTGGTATATAACATGTTTCATTTGCTTATTTAATGTCAAGCTCTTTCCACTATCAAGTCCATGAAAA
CAGGAACTTTATTCCTCTATTCTGTTTTTGTGCTGTATTCTTAGCAATTTTACAATTTTGAATGAAATGAATGAGCA
GTCAAACACATATACAACTATAATTAAAAGGATGTATGCTGACACATCCACTGCTATGCACACACAAAGAAATCAGT
GGAGTAGAGCTGGAAGCGCTAAGCCTGCATAGAGCTAGTTAGCCCTCCGCAGGCAGAGCCTTGATGGGATTACTGAG
TTCTAGAATTGGACTCATTTGTTTTGTAGGCTGAGATTTGCTCTTGAAAACTTGTTCTGACCAAAATAAAAGGCTCA
AAAGATGAATATCGAAACCAGGGTGTTTTTTACACTGGAATTTATAACTAGAGCACTCATGTTTATGTAAGCAATTA
ATTGTTTCATCAGTCAGGTAAAAGTAAAGAAAAACTGTGCCAAGGCAGGTAGCCTAATGCAATATGCCACTAAAGTA
AACATTATTCCATAGGTGTCAGATATGGCTTATTCATCCATCTTCATGGGAAGGATGGCCTTGGCCTGGACATCAGT
GTTATGTGAGGTTCAAAACACCTCTAGGCTATAAGGCAACAGAGCTCCTTTTTTTTTTTTCTGTGCTTTCCTGGCTG
TCCAAATCTCTAATGATAAGCATACTTCTATTCAATGAGAATATTCTGTAAGATTATAGTTAAGAATTGTGGGAGCC
ATTCCGTCTCTTATAGTTAAATTTGAGCTTCTTTTATGATCACTGTTTTTTTAATATGCTTTAAGTTCTGGGGTACA
TGTGCCATGGTGGTTTGCTGCACCCATCAACCCGTCATCTACATTAGGTATTTCTCCTAATGCTATCCTTCCCCTAG
CCCCCCACCCCCAACAGGCCCCAGTGTGTGATGTTCCCCTCCCTGTGTCCATGGATCACTGGTTTTTTTTTTTTTTT
TTTTTTTTTTTTTAAAGTCTCAGTTAAATTTTTGGAATGTAATTTATTTTCCTGGTATCCTAGGACCTGCAAGTTAT
CTGGTCACTTTAGCCCTCACGTTTTGATGATAATCACATATTTGTAAACACAACACACACACACACACACACACACA
TATATATATATAAAACATATATATACATAAACACACATAACATATTTATCGGGCATTTCTGAGCAACTAACTCATGC
AGGACTCTCAAACACTAACCTATAGCCTTTTCTATGTATCTACTTGTGTAGAAACCAAGCGTGGGGACTGAGAAGGC
AATAGCAGGAGCATTCTGACTCTCACTGCCTTTGGCTAGGTCCCTCCCTCATCACAGCTCAGCATAGTCCGAGCTCT
TATCTATATCCACACACAGTTTCTGACGCTGCCCAGCTATCACCATCCCAAGTCTAAAGAAAAAAATAATGGGTTTG
CCCATCTCTGTTGATTAGAAAACAAAACAAAATAAAATAAGCCCCTAAGCTCCCAGAAAACATGACTAAACCAGCAA
GAAGAAGAAAATACAATAGGTATATGAGGAGACTGGTGACACTAGTGTCTGAATGAGGCTTGAGTACAGAAAAGAGG
CTCTAGCAGCATAGTGGTTTAGAGGAGATGTTTCTTTCCTTCACAGATGCCTTAGCCTCAATAAGCTTGCGGTTGTG
GAAGTTTACTTTCAGAACAAACTCCTGTGGGGCTAGAATTATTGATGGCTAAAAGAAGCCCGGGGGAGGGAAAAATC
ATTCAGCATCCTCACCCTTAGTGACACAAAACAGAGGGGGCCTGGTTTTCCATATTTCCTCATGATGGATGATCTCG
TTAATGAAGGTGGTCTGACGAGATCATTGCTTCTTCCATTTAAGCCTTGCTCACTTGCCAATCCTCAGTTTTAACCT
TCTCCAGAGAAATACACATTTTTTATTCAGGAAACATACTATGTTATAGTTTCAATACTAAATAATCAAAGTACTGA
AGATAGCATGCATAGGCAAGAAAAAGTCCTTAGCTTTATGTTGCTGTTGTTTCAGAATTTAAAAAAGATCACCAAGT
CAAGGACTTCTCAGTTCTAGCACTAGAGGTGGAATCTTAGCATATAATCAGAGGTTTTTCAAAATTTCTAGACATGA
GATTCAAAGCCCTGCACTTAAAATAGTCTCATTTGAATTAACTCTTTATATAAATTGAAAGCACATTCTGAACTACT
TCAGAGTATTGTTTTATTTCTATGTTCTTAGTTCATAAATACATTAGGCAATGCAATTTAATTAAAAAAACCCAAGA
ATTTCTTAGAATTTTAATCATGAAAATAAATGAAGGCATCTTTACTTACTCAAGGTCCCAAAAGGTCAAAGAAACCA
GGAAAGTAAAGCTATATTTCAGCGGAAAATGGGATATTTATGAGTTTTCTAAGTTGACAGACTCAAGTTTTAACCTT
CAGTGCCCATGATGTAGGAAAGTGTGGCATAACTGGCTGATTCTGGCTTTCTACTCCTTTTTCCCATTAAAGATCCC
TCCTGCTTAATTAACATTCACAAGTAACTCTGGTTGTACTTTAGGCACAGTGGCTCCCGAGGTCAGTCACACAATAG
GATGTCTGTGCTCCAAGTTGCCAGAGAGAGAGATTACTCTTGAGAATGAGCCTCAGCCCTGGCTCAAACTCACCTGC
AAACTTCGTGAGAGATGAGGCAGAGGTACACTACGAAAGCAACAGTTAGAAGCTAAATGATGAGAACACATGGACTC
ATAGAGGGAAACAACGCATACTGGGGCCTATCAGAGGGTGGAGGGTGAGAGAAGGAGAGGATCAGGAAAAATCACTA
ATGGATGCTAAGCGTAATACCTGAGTGATGAGATCATCTATACAACAAACCCCCTTGACATTCATTTATCTATGTAA
CAAACCTGCACATCCTGTACACGTACCCCTGAACTTAAAATAAAAGTTGAAAACAAGAAAGCAACAGTTTGAACACT
TGTTATGGTCTATTCTCTCATTCTTTACAATTACACTAGAAAATAGCCACAGGCTCCTGCAAGGCAGCCACAGAATT
TATGACTTGTGATATCCAAGTCATTCCTGGATAATGCAAAATCTAACACAAAATCTAGTAGAATCATTTGCTTACAT
CTATTTTTGTTCTGAGAATATAGATTTAGATACATAATGGAAGCAGAATAATTTAAAATCTGGCTAATTTAGAATCC
TAAGCAGCTCTTTTCCTATCAGTGGTTTACAAGCCTTGTTTATATTTTTCCTATTTTAAAAATAAAAATAAAGTAAG
TTATTTGTGGTAAAGAATATTCATTAAAGTATTTATTTCTTAGATAATACCATGAAAAACATTCAGTGAAGTGAAGG
GCCTACTTTACCCAACAAGAATCTAATTTATATAATTTTTCATACTAATAGCATCTAAGAACAGTACAATATTTGAC
TCTTCAGGTTAAACATATGTCATAAATTAGCCAGAAAGATTTAAGAAAATATTGGATGTTTCCTTGTTTAAATTAGG
CATCTTACAGTTTTTAGAATCCTGCATAGAACTTAAGAAATTACAAATGCTAAAGCAAACCCAAACAGGCAGGAATT
AATCTTCATCGAATTTGGGTGTTTCTTTCTAAAAGTCCTTTATACTTAAATGTCTTAAGACATACATAGATTTTATT
TTACTAATTTTAATTATACAGACAATAAATGAATATTCTTACTGATTACTTTTTCTGACTGTCTAATCTTTCTGATC
TATCCTGGATGGCCATAACACTTATCTCTCTGAACTTTGGGCTTTTAATATAGGAAAGAAAAGCAATAATCCATTTT
TCATGGTATCTCATATGATAAACAAATAAAATGCTTAAAAATGAGCAGGTGAAGCAATTTATCTTGAACCAACAAGC
ATCGAAGCAATAATGAGACTGCCCGCAGCCTACCTGACTTCTGAGTCAGGATTTATAAGCCTTGTTACTGAGACACA
AACCTGGGCCTTTCAATGCTATAACCTTTCTTGAAGCTCCTCCCTACCACCTTTAGCCATAAGGAAACATGGAATGG
GTCAGATCCCTGGATGCAAGCCAGGTCTGGAACCATAGGCAGTAAGGAGAGAAGAAAATGTGGGCTCTGCAACTGGC
TCCGAGGGAGCAGGAGAGAATCAACCCCATACTCTGAATCTAAGAGAAGACTGGTGTCCATACTCTGAATGGGAAGA
ATGATGGGATTACCCATAGGGCTTGTTTTAGGGAGAAACCTGTTCTCCAAACTCTTGGCCTTGAGATACCTGGTCCT
TATTCCTTGGACTTTGGCAATGTCTGACCCTCACATTCAAGTTCTGAGGAAGGGCCACTGCCTTCATACTGTGGATC
TGTAGCAAATTCCCCCTGAAAACCCAGAGCTGTATCTTAATTGTTTAAAAAAATTATATTATCTCAAGGACTGTTCT
TCTCTGAGTAGCCAAGCTCAGCTTGGTTCAAGCTACAAGCAGCTGCGCTGCTTTTTGTCTAGTCATTGTTCTTTTAT
TTCAGTGGATCAAATACGTTCTTTCCAAACCTAGGATCTTGTCTTCCTGGACTATATATTTTATCCACGAAGTCTTA
ATCTGGGGTCCACAGAACACTAGGGGGCTGGTGAAGTTTATAGAAAAAAAATCTGTATTTTTACTTACATGTAACTG
AAATTTAGCATTTTCTTCTACTTTGAATGCAAAGGACAAACTAGAATGACATCATCAGTACCTATTGCATAGTTATA
AAGAGAAACCACAGATATTTTCATACTACACCATAGGTATTGCAGATCTTTTTGTTTTTGTTTTTGTTTGAGATGGA
GTTTCGCTCTTATTGCCCAGGCTGGAGTGCAGTGGCATGATTTCGGCTCACTGCAACCTCCCCTTCCTGCATTCAAG
CAATTCTCCTGCCTTGGCCTCCAGAGTAGCTGGGGATTACAGGCACCTGCCACCATGCCAGTCTAATTTTTGTATTT
TTAGTAGAGAATGGGTTTCGCCATGTTGGCCAGGCTGGTCTTGAACTCCTGACCTCAGATGATCTGCCCGCCTTGGC
CTCCTGAAGTGCTGGGATTATAGGTGTGAGCCACCACGCCTGGCCCATTGCAGATATTTTTAATTCACATTTATCTG
CATCACTACTTGGATCTTAAGGTAGCTGCAGACCCAATCCCAGATCTAATGCTTTCATAAAGAAGCAAATATAATAA
ATACTATACCACAAATGTAATGTTTGATGTCTGATAATGATATTTCAGTGTAATTAAACTTAGCACTCCATGTATAT
TATTTGATGCAATAAAAACATATTTTTTTAGCACTTACAGTCTGCCAAACTGGCCTGTGACACAAAAAAAGTTTAGG
GGAATTCCCCTAGTTTTGTCTGTGTTAGCCAATGGTTAGAATATATGCTCAGAAAGATACCATTGGTTAATAGCTAA
AAGAAAATGGAGTAGAAATTCAGTGGCCTGGAATAATAACAATTTGGGCAGTCATTAAGTCAGGTGAAGACTTCTGG
AATCATGGGAGAAAAGCAAGGGAGACATTCTTACTTGCCACAAGTGTTTTTTTTTTTTTTTTTTTTTATCACAAACA
TAAGAAAATATAATAAATAACAAAGTCAGGTTATAGAAGAGAGAAACGCTCTTAGTAAACTTGGAATATGGAATCCC
CAAAGGCACTTGACTTGGGAGACAGGAGCCATACTGCTAAGTGAAAAAGACGAAGAACCTCTAGGGCCTGAACATAC
AGGAAATTGTAGGAACAGAAATTCCTAGATCTGGTGGGGCAAGGGGAGCCATAGGAGAAAGAAATGGTAGAAATGGA
TGGAGACGGAGGCAGAGGTGGGCAGATCATGAGGTCAAGAGATCGAGACCATCCTGGCAAACATGGTGAAATCCCGT
CTCTACTAAAAATAAAAAAATTAGCTGGGCATGGTGGCATGCGCCTGTAGTCCCAGCTGCTCGGGAGGCTGAGGCAG
GAGAATCGTTTGAACCCAGGAGGCGAAGGTTGCAGTGAGCTGAGATAGTGCCATTGCACTCCAGTCTGGCAACAGAG
TGAGACTCCGTCTCAAAAAAAAAAAAAAGAAAGAAAGAAAAGAAAAAGAAAAAAGAAAAAATAAATGGATGTAGAAC
AAGCCAGAAGGAGGAACTGGGCTGGGGCAATGAGATTATGGTGATGTAAGGGACTTTTATAGAATTAACAATGCTGG
AATTTGTGGAACTCTGCTTCTATTATTCCCCCAATCATTACTTCTGTCACATTGATAGTTAAATAATTTCTGTGAAT
TTATTCCTTGANTCCCAAAATATTGAGGTAAATAACAATGGTATTATAAAAGGGCAGATTAAGTGATATAGCATAAG
CAATATTCTTCAGGCACATGGATCGAATTGAATACACTGTAAATCCCAACTTCCAGTTTCAGCTCTACCAAGTAAAG
AGCTAGCAAGTCATCAAAATGGGGACATACAGAAAAAAAAAAGGACACTAGAGGAATAATATACCCTGACTCCTAGC
CTGATTAATATATCGATTCACTTTTACTCTGTTTGGTGACAAATTCTGGCTTTAAATAATTTTAGGATTTTAGGCTT
CTCAGCTCCCTTCCCAGTGAGAAGTATAAGCAGGACAGCAGGCAAGCAAGAAGAGAGCCCAAGGCAATACTCACAAA
GTAGCCAGTGTCCCCTGTGGTCATAGAGAAATGGAAAGAGAGAGGANTCCCCCCTTGGAGCCACTGGGTGGTAATCC
TTTCCGTCCGTTCCTCTCTAGGGAATCACCCCAAGGTACTGTACTTTGGGATTAAGGCTTTAGTCCCACTGTGGACT
ACTTGCTATTCTGTTCAGTTTCTGAAGGAACTATGTACGGTTTTTGTCTCCCTAGAGAAACTAAGGTACAGAAGTTT
TGTTTACAATGCACTCCTTAAGAGAGCTAGAACTGGGTGAAGANTCCTGGTTTAACCAGCCTTAATTTCCTTTCCCT
GGGCCCCGGTTTGGTCACGTCACTGTCACCACCTTTAAGGCAAATGTTAAATGCGCTTTGGCTGAACTTTTTCCTAT
TTTGAGATTTGCTCCTTTATATGAGGCTTTCTTGGAAAAGGAGAATGGGAGAGATGGATATCATTTTGGAAGATGAT
GAAGAGGGTAAAAAAGGGTACAAATGGAAATTTGTGTTGCAGATAGTATGAGGAGCCAACAAAAAAGAGCCTCAGGA
TCCAGCACACATTATCACAAACTTAGTGTCCATCCATCACTGCTGACCCTCTCCGGACCTGACTCCACCCCTGAGGA
CACAGGTCAGCCTTGACCAATGACTTTTAAGTACCATGGAGAACAGGGGGCCAGAACTTCGGCAGTAAAGAATAAAA
GGCCAGACAGAGAGGCAGCAGCACATATCTGCTTCCGACACAGCTGCAATCACTAGCAAGCTCTCAGGCCTGGCATC
ATGGTGCATTTTACTGCTGAGGAGAAGGCTGCCGTCACTAGCCTGTGGAGCAAGATGAATGTGGAAGAGGCTGGAGG
TGAAGCCTTGGGCAGGTAAGCATTGGTTCTCAATGCATGGGAATGAAGGGTGAATATTACCCTAGCAAGTTGATTGG
GAAAGTCCTCAAGATTTTTTGCATCTCTAATTTTGTATCTGATATGGTGTCATTTCATAGACTCCTCGTTGTTTACC
CCTGGACCCAGAGATTTTTTGACAGCTTTGGAAACCTGTCGTCTCCCTCTGCCATCCTGGGCAACCCCAAGGTCAAG
GCCCATGGCAAGAAGGTGCTGACTTCCTTTGGAGATGCTATTAAAAACATGGACAACCTCAAGCCCGCCTTTGCTAA
GCTGAGTGAGCTGCACTGTGACAAGCTGCATGTGGATCCTGAGAACTTCAAGGTGAGTTCAGGTGCTGGTGATGTGA
TTTTTTGGCTTTATATTTTGACATTAATTGAAGCTCATAATCTTATTGGAAAGACCAACAAAGATCTCAGAAATCAT
GGGTCGAGCTTGATGTTAGAACAGCAGACTTCTAGTGAGCATAACCAAAACTTACATGATTCAGAACTAGTGACAGT
AAAGGACTACTAACAGCCTGAATTGGCTTAACTTTTCAGGAAATCTTGCCAGAACTTGATGTGTTTATCCCAGAGAA
TTGTATTATAGAATTGTAGACTTGTGAAAGAAGAATGAAATTTGGCTTTTGGTAGATGAAAGTCCATTTCAAGGAAA
TAGAAATGCCTTATTTTATGTGGGTCATGATAATTGAGGTTTAGAAGAGATTTTTGCAAAAAAAATAAAAGATTTGC
TCAAAGAAAAATAAGACACATTTTCTAAAATATGTTAAATTTCCCATCAGTATTGTGACCAAGTGAAGGCTTGTTTC
CGAATTTGTTGGGGATTTTAAACTCCCGCTGAGAACTCTTGCAGCACTCACATTCTACATTTACAAAAATTAGACAA
TTGCTTAAAGAAAAACAGGGAGAGAGGGAACCCAATAATACTGGTAAAATGGGGAAGGGGGTGAGGGTGTAGGTAGG
TAGAATGTTGAATGTAGGGCTCATAGAATAAAATTGAACCTAAGCTCATCTGAATTTTTTGGGTGGGCACAAACCTT
GGAACAGTTTGAGGTCAGGGTTGTCTAGGAATGTAGGTATAAAGCCGTTTTTGTTTGTTTGTTTGTTTTTTCATCAA
GTTGTTTTCGGAAACTTCTACTCAACATGCCTGTGTGTTATTTTGTCTTTTGCCTAACAGCTCCTGGGTAACGTGAT
GGTGATTATTCTGGCTACTCACTTTGGCAAGGAGTTCACCCCTGAAGTGCAGGCTGCCTGGCAGAAGCTGGTGTCTG
CTGTCGCCATTGCCCTGGCCCATAAGTACCACTGAGTTCTCTTCCAGTTTGCAGGTCTTCCTGTGACCCTGACACCC
TCCTTCTGCACATGGGGACTGGGCTTGGCCTTGAGAGAAAGCCTTCTGTTTAATAAAGTACATTTTCTTCAGTAATC
AAAAATTGCAATTTTATCTTCTCCATCTTTTACTCTTGTGTTAAAAGGAAAAAGTGTTCATGGGCTGAGGGATGGAG
AGAAACATAGGAAGAACCAAGAGCTTCCTTAAGAAATGTATGGGGGCTTGTAAAATTAATGTGGATGTTATGGGAGA
ATTCCCAAGATTCCCAAGGAGGATGATATGATGGAGAAAAATCTTTATCGGGGTGGGAAAATGGTTAATTAAGTGGC
AGAGACTCCTAGGCAGTTTTTACTGCACCGGGGAAAGAAGGAGCTGTTGTGGTACCTGAGAAAGCAGATTTGTGGTA
CATGTCACTTTTCATTAAAAACAAAAACAAAACAAAACAAAACTTCATAGATATCCAAGATATAGGCTGAGAATTAC
TATTTTAATTTACTCTTATTTACATTTTGAAGTAGCTAGCTTGTCACATGTTTTATGAAATTGATTTGGAGATAAGA
TGAGTGTGTATCAACAATAGCCTGCTCTTTCCATGAAGGATTCCATTATTTCATGGGTTAGCTGAAGCTAAGACACA
TGATATCATTGTGCATTATCTTCTGATACAATGTAACATGCACTAAAATAAAGTTAGAGTTAGGACCTGAGTGGGAA
AGTTTTTGGAGAGTGTGATGAAGACTTTCCGTGGGAGATAGAATACTAATAAAGGCTTAAATTCTAAAACCAGCAAG
CTAGGGCTTCGTGACTTGCATGAAACTGGCTCTCTGGAAGTAGAAGGGAGAGTAAGACATACGTAGAGGACTAGGAA
AGACCAGATAGTACAGGGCCTGGCTACAAAAATACAAGCTTTTACTATGCTATTGCAATACTAAACGATAAGCATTA
GGATGTTAAGTGACTCAGGAAATAAGATTTTGGGAAAAAGTAATCTGCTTATGTGCACAAAATGGATTCAAGTTTGC
AGATAAAATAAAATATGGATGATGATTCAAGGGGACAGATACAATGGTTCAAACCCAAGAGGAGCAGTGAGTCTGTG
GAATTTTGAAGGATGGACAAAGGTGGGGTGAGAAAGACATAGTATTCGACCTGACTGTGGGAGATGAGAAGGAAGAA
GGAGGTGATAAATGACTGAAAGCTCCCAGACTGGTGAAGATAACAGGAGGAAACCATGCACTTGACCCTGGTGACTC
TCATGTGTGAAGGGTAGAGGGATATTAACAGATTTACTTTTTAGGAAGTGCTAGATTGGTCAGGGAGTTTTGACCTT
CAGGTCTTGTGTCTTTCATATCAAGGAACCTTTGCATTTTCCAAGTTAGAGTGCCATATTTTGGCAAATATAACTTT
ATTAGTAATTTTATAGTGCTCTCACATTGATCAGACTTTTTCCTGTGAATTACTTTTGAATTTGGCTGTATATATCC
AGAATATGGGAGAGAGACAAATAATTATTGTAGTTGCAGGCTATCAACAATACTGGTCTCTCTGAGCCTTATAACCT
TTCAATATGCCCCATAAACAGAGTAAACAGGGATTATTCATGGCACTAAATATTTTCACCTAGGTCAGTCAACAAAT
GGAGGCAATGTGCATTTTTTGATACATATTTTTATATATTTATGGGGCATGTGATACTTACATGCCTAGAACATGTG
ACTGATTAAGTCTAGATATTTAGGATATCCATTACTTTGAGCATTTATCATTTCTATGTATTGAGAAAATTTCAAAT
CCTCATTTCTGACCATTTTGAAATATATAATAAATAGTAATTAACTATAGTCACCCTACTCAAATATCAACATTATA
AACTAACTAATCCTTCTTTCCACTTTTTTACCAACCAACATCTCTTAAATCCCCTGCCATACACATCACACATTTTT
CAGCTCTGATAACTATCATTCTACTCTCATACCACCATGAGACCACTTTTTTAGCTCCACAGATGAATAAAAACATG
TGATATTTGACTTTCTGTATCTGGCTTATTTTATTATCTATCTCTTTGGCATACCAAGAGTTTGTTTTTGTTCTGCT
TCAGGGCTTTCAATTAACATAATGACCTCTGGTTCCATCCATGTTGCTACAAATGACAAGATTTCATTCTTTTTCAT
GGCAAAATAGTACTGTGCAAAAAATACAATTTTTTAATCCGTTCATCTGTTGATAGACACTTAGGTTGATCCCAAAC
CTTAACTATTGTGAATAGGTGCTTCAATAAACATGAGTGTAATGTGTCCATTGGATATACTGATTTCCTTTCTTTTG
GATAAATAACCACTAGTGAGATTGCTGGATTGTATGATAGTTCTGTTTTTAGTTTATTGAGAAATCTTCATACTGTT
TTCCATAATGGTTGTACTATTTTACATTCCCACCAACAGTGTGTAAGAAAGAGTTCCCTTTTCTCCATATCCTCACA
AGGATCTGTTATTTTTTGTCTTTTTTGTTAATAGCATTTTAACTAGAGTAAGTAGATATCTCATTGTAGTTTTGATT
TGCATTTCCCTGATCATTAGTGATGTTGAGATTTTTTCATATGTTTGTTGGTCATTTGTATATCTTTTTCTGAGATT
GTCTGTTCATGTCCTTATCCTACTTTTATTGGGATTGTTGTTATTTTCTTGATAATCATTGTGTCATTTTAGAGCCT
GGATATTATTCTTTTGTCAGATGTATAGATTGTGAAGATTTTCTCCTCTGTGGGTTGTCTGTTTATTCTGCAGACTC
TTCCTTTTGCCATGCAAAAGCTCTTTAGTTTAATTTAGTCCCAGATATTTTCTTTGTTTTTATGTGTTTGCATTTGT
GTTCTTGTCATGAAATCCTTTCCTAAGCCAATGTGTAGAAGGGTTTTTCCGATGTTATTTTCTAGAATTGTTACAGT
TTCAGGCTTAGATTTAAGTCCTTGATCCATCTTAAGTTGATTTTTGTATAAGGTGAGAGATGAAGATCCAGTTTCAT
TCTCCTACATGTAGCTTGCCAGCTATCCCGACTCATTTGTTGAATAGGGTGCCCTTTCCCATTTATGTTTTTGTTTG
CTTTGTCAAAGATCAGTTCGGATGTAAGTATTTGAGTTTATTTCTGGGTTCTCTATTCTGTTCCATTGGTCCGATGT
GCCTATTTGTACACCAGCATCATGCTGTGTTTTTGGTGACTATGGCCTTATTGTATAGTTTGAAATGAGGTAATGTA
ATGCCATTCAGATTTGTTCTTTTTTTTAGACTTGCTTGTTTATTGGGCTCTTTTTTGGTTCCATAAGAATTTTAGGA
TTGTTTTTTCTAGTTCTGTGAAGGCTAATGGTGGTATTTATGGGAATTGCAATGCAATTTGTAGGTTGCTTCTGGCA
TTATGGCCATTTTCACAATATTGATTCTACCCATCTATGAGAATGGCATGTGTTTCCATTTGTTTGTGTCTTATATG
ATTACTATCAGCCGTGTTTTGTAGTTTTCCTTGTAGATGTCTTTCACCTCCTTGGTTAGGTATATATTCCTAAGTTT
TTGTTTTGTTTTGTTTTGTTTTTTGCAGCTATTGTAAAAGGGGTTGAGTTATTGATTTTATTCTCATCTTGGTCATT
GCTGGTATGTAAGAAAGCAACTCATTGGTGTACGTTAATTTTGTATCCAGAAACTTTGCTGAATTATTTTATCAGTT
CTAGGGGGTTTTGGAGGAGTCTTTAGAGTTTTCTACATACACAATCATATCATCAGCAAACAGTGACAGTTTGACTT
TCTCTTTAACAATTTGGATGTGCTTTACTTGTTTCTCTTGTCTGATTGCTCTTGCTAGGACTTCCAGTAATATGTTA
AAGAGAAGTGGTGAGAGTGGGTATCCTTGTCTCATTCCAGTTTTCAGACAGAATGCTTTTAACTTTTTCCCATTCAA
TATAATGTTGGCTGTGTGTTTACCATAGCTGGCTTTTATTACATTGAGGTATGTCCTTTGTAAACCGATTTTGCTGA
GTTTTAGTCATAAAGTGATGTTGAATTTTGTTGAATGCAGTTTCTGTGGCTATTGAGATAATCACATGATTTTTGTT
TCCAATTCTCTTTATGTTGTGTATCACACTTATTGACTTGCGTATGTTAAACCATCCGTGCATCCCTCGCATGAAAC
CACTTGATCATGGGTTTTGATATGCCGTGTGGGATGCTATTAGCTATATTTTGTCAAGGATGTTGGCATCTATGTTC
ATCAGGGATATTGATCTGTAGTGTTTTTTTTTTTTGGTTATGTTCTTTCCCAGTTTTGGTATTAAGGTGATACTGGC
TTCATAGAATGATTTAGGGAGGATTCTCTCTTTCTCTATCTTGTAGAATACTGTCAATAGGATTGGTATCAATTCTT
CTTTGAATGTCTGGTAGAATTCGAACGTCTCCTTTAGGTTTTCTAGTTTATTCATGTAAAGGTGTTCATAGTAACCT
TGAATAATCTTTTGTATTTCTGTGGTATCAGTAATAGTATCTCCTGTTTTGTTTCTAACTGAGTTTATTTGCACTTC
TCTCCTCTTTTCTTGGTTAATCTTGCTAATGGTCTATCAGTTTTATTTATCTTTTCAAAGAACCAGCTTTTTATTTC
ATTTAGCTTTTGTATTTTTTTGCAGTTGTTTTAATTTCATTTAGTTCTCCTCTTATCTTAGTTATTCCCTTTCTTTT
GCTGGGTTTTGGTTCTGTTTGTTTTTGTTTCTCTAGTTTCTTGTGGTGTGACCTTATATTGTCTGTCCTCTTTCAGA
CTCTTTGACATCGACATTTAGGGCTGTGAACTTTCCTTTTAGCACCATCTTTGCTGTATCCTAGAGGTTTTGATAGG
TGTGTCACTATTGTCGGTCAGTTCAAGTAATTTTGTTGTTCTTATTATACTTTAAGTTCTGGGATACATGTGCAGAA
TGTGCAGGTTTGTTACATAGGTATAGATGTGCCATGGTGGTTTGCTGCTCCCATCAACCTGTCATCTACATTAGGTA
TTTCTTTTAATGTTATCCCTCTCCTAACCCCCTCACCCCCCGACAGGCCCTGGTGTGTGATGTTCCCCTCCCTGTGT
CCATGTGTTCTCATTGTTCAACTCCCACTTATGAGTGAGAACGTGTGGTGTTTGGTTTCTCTGTTCCTGTGTTAGTT
TGCTCAGAATGATGTTTCCACCTTCACCATGTCCCTGCAAAGACATGAACTCATCATTTTATGGCTGCATATATTCC
ATGGTGTATATGTGCCACATTTTCTTTATCCATTATATCGCTGATGGCCATTTGGGTTGGTTCCAAGTCTTTGGTAT
TGTGAATAGTGCCGCAATAAACATACGTGTGCACATGTCTTTATAGTAGAATGATTTCTAATTCTTTGGGTATATAC
CCAGTAATGGGATTGCTGGGTCAAACAGTATTTCTGGTTCTAGATCCTTGAGGAATTGCCACACTGTCTTCCACAAT
GGTTGAACTAATTTACACACCCATCAACAGTGTAAAATTTTTCCTATTCTTCCACATCCTCTCCAGCACCTTTTGTT
TCCTGACTTTTTAATAATTGCCATTCTAACTGGCATGAGATGGTATCTCATTGTGGTTTTGATTTGCATTTCTCTAA
TGACCAGTGATGATGAGCTTCTTTTCATGTGTTTCTTGGCCACATAAATGACTTCTTTAGAGAAGCATCTGTTCATA
TCCTTTGTCCACTTTTTGATGGGGTCGTTAGGTTTTTTCTTGTAAATTTGTTGAAGTTCTTTGTAGATTTTGGATGT
TAGCCCTTTGTCAGATGGATAGATTGGCAAAAATTTTCTCCCATTCTGTAGGTTGCCTGTTCACTCTGATGATAGTC
TTTTGCTGTGCAGAAGCTCTTTAGTTTAATTAGATCCCATATGTCAATTTTGGCCTTTGTTGTCATTGCTTTTGATG
TTTAGTCGTGGAATTTTGCCCATGCCTATGTCCTGAATGGTATTGCCTAGGTTATCTTCTAGGATTTTTATGGTTTT
AGGTTGCACATTTAAGTCTTTAATCCACCTTGAGTTAATTTTTGTATAAGGTGTAAGGAAGGGGTACAGTTTCAGTT
TTATGCATATTGCTAGCCAGTTTTTCCAGCACCATTTATTAAATAGGGAATTCTTTCTCCATTGCTTTTGTGATGTT
TGTCAAAGATCAGATGGTCGTAGATGTGTGGCATTATTTCTGAGGCTTCTGTTCTGTTCCACTGGTCTATATATCTG
TTTTGGTACCAGTACCATGCTGTTTTTGTTACTGTAGCCTTGTAGTATAGCTTGAAGTCAGGTAGCATCATGCCTCC
AGCTTTGTTCTTTTTGTTTAGGATTGTCTTGGCTATATGGGCTCTTTTTTGATTCCATATGACATTTAAAGTAGTTT
TTTCTAATTCTTTGAAAAAAGTCAGTGGTAGCTTGATGGGGATAGCATTGAATCTATAAATTACTTTGGGCAGTATG
GCCATTTTAAAGATATTGATTCTTTCTATCTATGAGCATGGAATGTTTTTCCATTTGTTTGTGTCCTCTCTTATTTC
CTTGAGCAGTGAGTGGTTTGTAGCTCTCCTTGAAGAGGTTCTTCACATCCCTTATAAGTTGTATTTCTAGGTATTTT
ATTTTATTCTCTTTGCAGCAATTGTGAATGGGAGTTCACCCATGATTTGGCTCTCTGCTTGTCTATTATTGGTGTAT
AGGAATGCTTGTGATTTTTGCACACTGATTTTGTATCTTGAGACTTTGCTGAAGCTGTTTATCAGCTTAAGATTTTG
GGCTGAGATGACAGGGTCTTCTAAATATACAATCATGTCATCTGCAAACAGAGACAATTTGACTTCCTCTCTTCCTA
TTTGAATATGCTTTATTTCTTTCTCTTGCCTGATTGTCCTGGCGAGAACTTCCAATACTATGTTGAGTAAGAGTGGC
GAGAGGGCATCCTTGTCTTGTGCCGGTTTTCAAAGCAAATGATTTTTAAATTTCCGTCTTGATTTCATTGTTGACCC
AATGATCATTCAGGAGCAGGTTATTTAATTTCCCTGTATTTGCATGGTTTTGAAGGTTCCTTTTGTAGTTGATTTCC
AATTTTATTCTACTGTGGTCTGAGAGAGTGCTTGATATAATTTCAATTTTTAAAAATTTATTGAGGCTTGTTTTGTG
GCATATCATATGGCCTATCTTGGAGAAAGTTCCATGTGCTGATGAATAGAATGTGTATTCTGCAGTTGTTGGGTAGA
ATGTCCTGTAAATATCTGTTAAGTCCATTTGTTCTTTAAATCCATTGTTTCTTTGTAGACTGTCTTGATGACCTGCC
TAGTGCAGTCAGTGGAGTATTGAAGTCCCCCACTATTATTATGTTGCTGTCTAGTAGTAATTGTTTTATAAATTTGG
GATCTCCAGTATTAGATGCATATATATTAAGAATTGTAATATTCTCCCATTGGACAAGGGCTTTTATCATTATATGA
TGTCCCTCTTTGTCTTTTTTAACTGCTGTTTCTTTAAAGTTTGTTTTGTCTGACATAAGAATAGCTGCTTTGGCTCG
CTTTTGGTGTCCATTTGTGTGGAATGTCATTTTCCACCCCTTTACCTTAAGTTTATGTGAGTCCTTATGTGTTAGGT
GAGTCTCCTGAAGGCGGCAGATAACTGGTTGGTGAATTCTATTCATTCTGCAATTCTGTATCTTTTAAGTGGAGCAT
TTAGTCCATTTACATTCAACATCAGTATTGAGGTGTGAGGTGACTATTCCATTCTTCGTGGTATTTGTTGCCTGTGT
ATCTTTTTATCTGTATTTTTGTTGTATATGTCCTATGGGATTTATGCTTTAAAGAGGTTCTGTTTTGATGTGCTTCC
AGGGTTTATTTCAAGATTTAGAGCTCCTTTTATCATTCTTGTAGTGTTGGCTTGGTAGTGCCGAATTCTCTCAGCAT
TTGTTTTTCTGAAAAACACTGTGTATTTTCTTCATTTGTGAAGCTTAGTTTCACTGGATATAAAATTCTTGGCTGAT
AATTGTTTTGTTTAAGAAGGCTGAAGATAGGGCCATATTCACTTCTAGCTTTTACGGTTTCTGCTGAGAAATCTGCT
GTTAATCTGATAGGTTTTCTTTCATAGGTTACCTGGTAGTTTCACCTCACAGCTCTTAAGATTCTCTTTGTCTTTAG
ATAACTTTGGATACTCTGATGACAATGTACCTAGGCAATGATATTTTTGCAATGAATTTCCCAGGTGTTTATTGAGC
TTCTTTGTATTTGGATATCTAGGTCTCTAGCAAGGAGGGGGAAGTTTTCCTTGATTATTTCCATGGACAAGTTTTCC
AAACTTTTAGATTTCTCTTCTTTCTCAGGAATGCTGATTATTCTTAGGTTTGATTGTTTAACATAATCCCAGATTTC
TTGGAGGCTTTGTTCATATTTTCTTATTCTTTTTTCTTTGTCTTTGTTGGATTGGGTAATTCAAAAACTTTGTCTTC
AAGCTCTGAATTTCTTCTGCTTGGATTCTATTGCTGAGACTTTCTAGAGCATTTTGCATTTCTATAAGTGCATCCAT
TCATCCATTGTTTCCTGAAGTTTTGAATGTTTTTTATTTATGCTATCTCTTTAACTGAAGATTTCTCCCCTCATTTC
TTGTATCATATTTTTGGTTTTTTTAAAATTGGACTTCACCTTCCTCGGATGCCTCCTTGATTAGCTTAATAACTGAC
CTTCTGAATTATTTTTCAGGTAAATCAGGGATTTCTTCTTGGTTTGGATGCATTGCTGGTGAGCTAGTATGATTTTT
TGGGGGGTGTTAAAGAACCTTGTTTTTCATATTACCAGAGTTAGTTTTCTGGTTCCTTCTCACTTGGGTAGGCTCTG
TCAGAGGGAAAGTCTAGGCCTCAAGGCTGAGACTTTTGTCCCAGCAGGTGTTCCCTTGATGTAGCACAGTCCCCCTT
TTCCTAGGACGTGGGGCTTCCTGAGAGCCGAACTGTAGTGATTGTTATCTCTCTTCTGGATCTAGCCACCCATCAGG
TCTACCAGACTCCAGGCTGGTACTGGGGTTTGTCTGCACAGAGTCTTGTGACGTGAACCATCTGTGGGTCTCTCAGC
CATAGATACAACCACCTGCTCCAATGGAGGTGGTAGAGGATGAAATGAACTCTGTGAGGGTCCTTACTTTTGGTTGT
TCAATGCACTATCTTTTTGTGCTGGTTGGCCTCCTGCCAGGAGGTGGCACTTTCTAGAAAGCATCAGCAGAGGCAGT
CAGGTGGTGGTGGCTGGGGGGGCTGGGGCACTAGAACTCCCAAGAATATATGCCCTTTGTCTTCAGCTACTAGGGTG
AGTAAGGAAGGACCATCAGGTGGGGGCAGGACTAGTCGTGTCTGAGCTCAGAGTCTCCTTGGGCAGGTCTTTCTGTG
GCTACTGTGGGAGGATGGGGGTGTAGTTTCCAGGTCAATGGATTTATGTTCCTAGGACAATTATGGCTGCCTCTGCT
GTGTCATGCAGGTCATCAGGAAAGTGGGGGAAAGCAAGCAGTCACGTGACTTGCCCAGCTCCCATGCAACTCAAAAG
GTTGGTCTCACTTCCAGCGTGCACCCTCCCCCGCAACAGCTCCGAATCTGTTTCCATGCAGTCAGTGAGCAAGGCTG
AGAACTTGCCCAGGCTACCAGCTGCGAAACCAAGTAGGGCTGTCCTACTTCCCTGCCAGTGGAGTCTGCACACCAAA
TTCATGTCCCCCCACCAACCCCCCCACTGCCCAGCCCCTAGATCTGGCCAGGTGGAGATTTTCTTTTTCCTGTCTCT
TTTCCCAGTTCCTCTGGCAGCCCTCCCAAATGACCCCTGTGAGGCAAGGCAGAAATGGCTTCCTAGGGGACCCAGAG
AGCCCACAGGGCTTTTCCCGCTGCTTCCTCTACCCCTGTATTTTGCTTGGCCCTCTAAATTGACTCAGCTCCAGGTA
AGGTCAGAATCTTCTCCTGTGGTCTAGATCTTCAGGTTCCCAGTGAGGATGTGTGTTTGGGGGTAGACGGTCCCCCT
TTTCCACTTCCACAGTTTGGGCACTCACAATATTTGGGGTGTTTCCCGGGTCCTACATGAGCAATCTGCTTCTTTCA
GAGGGTGTGTGCGTTCTCTCAGCTTTCTTGAATTTATTTCTGCAGGTGGTTCTGCAAAAAAAATTCCTGATGGGAGA
CTTCACATGCTGCTCTGTGCATCCGAGTGGGAGCTGCAATGTACTTCTGCTGCCACCCATCTGCCATCACCCTCTAA
TTTGTCGGTAATATGCATTTTTAATCAATCTTTTTTTCTCTCTCTCTCTTTTCTTCTCCCCCAAAACTATACTGCCC
TTTGATATCAAGGAATCAAGGCCGTGATGTTGAGGGGTGGGCAGTGGATACACTCTTTACCCCTTAGGGAGCATATC
TAGATTTAGATATTGCCAATTCAAGATAACTTAATTGAAAGCAAATTCATAATGAATACACACACACACACACACAT
CTGCATGACAAGATTTTTAATAGTTGAAAGAATAACTAATAATTGTCCACAGGCAATAAGGGCTTTTTAAGCAAAAC
AGTTGTGATAAAACAGGTCATTCTTAGAATAGTAATCCAGCCAATAGTACAGGTTGCTTAGAGATTATGACATTACC
AGAGTTAAAATTCAATAATGGCTTCTCACTCCCTACCACTGAGGACAAGTTTATGTCCTTAGGTTTATGCTTCCCTG
AAACAATACCACCTGCTATTCTCCACTTTACATATCAACGGCACTGGTTCTTTATCTAACTCTCTGGCACAGCAGGA
GTTTGTTTTCTTCTGCTTCAGAGCTTTGAATTTACTATTTCAGCTTCTAAACTTTATTTGCAATGCCTTCCCATGGC
AGACTCCTTCTGTCATTTTGCCTCTGTTCGAAAACTTTTTCCTTAATTTCATTCTTAGTTAATAATATCTGAAATTA
TTTTGTTGTTTAACTTAATTATTAATTTTATGTATGTTCTACCTAGATATAATCTTCTAGAGGATTGTTTTATTCTC
TGACTTATTTAACTTAAATGCCCACTACCTTTAAAAATTATGACATTTATTTAACAGATATTTGCTGAACAAATGTT
TGAAAATACATGGGAAAGAATGCTTGAAAACACTTGAAATTGCTTGTGTAAAGAAACAGTTTTATCAGTTAGGATTT
AATCAATGTCAGAAGCAATGATATAGGAAAAATCGAGGAATAAGACAGTTATGGATAAGGAGAAATCAACAAACTCT
TAAAAGATATTGCCTCAAAAGCATAAGAGGAAATAAGGGTTTATACATGACTTTTAGAACACTGCCTGGGTTTTTGG
ATAAATGGGGAAGTTGTTGGAAAACAGGAGGGATCCTAGATATTCCTTAGTCTGAGGAGGAGCAATTAAGATTCACT
TGTTTAGAGGCTGGGAGTGGTGGCTCACGCCTGTAATCCCAGAATTTTGGGAGGCCAAGGCAGGCAGATCACCTGAG
GTCAAGAGTTCAAGACCAACCTGGCCAACATGGTGAAATCCCATCTCTACAAAAATACAAAAATTAGACAGGCATGA
TGGCAAGTGCCTGTAATCCCAGCTACTTGGGAGGCTGAGGAAGGAGAATTGCTTGAACCTGGAAGGCAGGAGTTGCA
GTGAGCCGAGATCATACCACTGCACTCCAGCCTGGGTGACAGAACAAGACTCTGTCTCAAAAAAAAAAAAGAGAGAT
TCAAAAGATTCACTTGTTTAGGCCTTAGCGGGCTTAGACACCAGTCTCTGACACATTCTTAAAGGTCAGGCTCTACA
AATGGAACCCAACCAGACTCTCAGATATGGCCAAAGATCTATACACACCCATCTCACAGATCCCCTATCTTAAAGAG
ACCCTAATTTGGGTTCACCTCAGTCTCTATAATCTGTACCAGCATACCAATAAAAATCTTTCTCACCCATCCTTAGA
TTGAGAGAAGTCACTTATTATTATGTGAGTAACTGGAAGATACTGATAAGTTGACAAATCTTTTTCTTTCCTTTCTT
ATTCAACTTTTATTTTAACTTCCAAAGAACAAGTGCAATATGTGCAGCTTTGTTGCGCAGGTCAACATGTATCTTTC
TGGTCTTTTAGCCGCCTAACACTTTGAGCAGATATAAGCCTTACACAGGATTATGAAGTCTGAAAGGATTCCACCAA
TATTATTATAATTCCTATCAACCTGATAAGTTAGGGGAAGGTAGAGCTCTCCTCCAATAAGCCAGATTTCCAGAGTT
TCTGACGTCATAATCTACCAAGGTCATGGATCGAGTTCAGAGAAAAAACAAAAGCAAAACCAAACCTACCAAAAAAT
AAAAATCCCAAAGAAAAAATAAAGAAAAAAACAGCATGAATACTTCCTGCCATGTTAAGTGGCCAATATGTCAGAAA
CAGCACTGAGTTACAGATAAAGATGTCTAAACTACAGTGACATCCCAGCTGTCACAGTGTGTGGACTATTAGTCAAT
AAAACAGTCCCTGCCTCTTAAGAGTTGTTTTCCATGCAAATACATGTCTTATGTCTTAGAATAAGATTCCCTAAGAA
GTGAACCTAGCATTTATACAAGATAATTAATTCTAATCCATAGTATCTGGTAAAGAGCATTCTACCATCATCTTTAC
CGAGCATAGAAGAGCTACACCAAAACCCTGGGTCATCAGCCAGCACATACACTTATCCAGTGATAAATACACATCAT
CGGGTGCCTACATACATACCTGAATATAAAAAAAATACTTTTGCTGAGATGAAACAGGCGTGATTTATTTCAAATAG
GTACGGATAAGTAGATATTGAAGTAAGGATTCAGTCTTATATTATATTACATAACATTAATCTATTCCTGCACTGAA
ACTGTTGCTTTATAGGATTTTTCACTACACTAATGAGAACTTAAGAGATAATGGCCTAAAACCACAGAGAGTATATT
CAAGAATAAGTATAGCACTTCTTATTTGGAAACCAATGCTTACTAAATGAGACTAAGACGTGTCCCATCAAAAATCC
TGGACCTATGCCTAAAACACATTTCACAATCCCTGAACTTTTCAAAAATTGGTACATGCTTTAACTTTAAACTACAG
GCCTCACTGGAGCTACAGACAAGAAGGTGAAAAACGGCTGACAAAAGAAGTCCTGGTATCTTCTATGGTGGGAGAAG
AAAACTAGCTAAAGGGAAGAATAAATTAGAGAAAAATTGGAATGACTGAATCGGAACAAGGCAAAGGCTATAAAAAA
AATTAAGCAGCAGTATCCTCTTGGGGGCCCCTTCCCCACACTATCTCAATGCAAATATCTGTCTGAAACGGTTCCTG
GCTAAACTCCACCCATGGGTTGGCCAGCCTTGCCTTGACCAATAGCCTTGACAAGGCAAACTTGACCAATAGTCTTA
GAGTATCCAGTGAGGCCAGGGGCCGGCGGCTGGCTAGGGATGAAGAATAAAAGGAAGCACCCTTCAGCAGTTCCACA
CACTCGCTTCTGGAACGTCTGAGGTTATCAATAAGCTCCTAGTCCAGACGCCATGGGTCATTTCACAGAGGAGGACA
AGGCTACTATCACAAGCCTGTGGGGCAAGGTGAATGTGGAAGATGCTGGAGGAGAAACCCTGGGAAGGTAGGCTCTG
GTGACCAGGACAAGGGAGGGAAGGAAGGACCCTGTGCCTGGCAAAAGTCCAGGTCGCTTCTCAGGATTTGTGGCACC
TTCTGACTGTCAAACTGTTCTTGTCAATCTCACAGGCTCCTGGTTGTCTACCCATGGACCCAGAGGTTCTTTGACAG
CTTTGGCAACCTGTCCTCTGCCTCTGCCATCATGGGCAACCCCAAAGTCAAGGCACATGGCAAGAAGGTGCTGACTT
CCTTGGGAGATGCCATAAAGCACCTGGATGATCTCAAGGGCACCTTTGCCCAGCTGAGTGAACTGCACTGTGACAAG
CTGCATGTGGATCCTGAGAACTTCAAGGTGAGTCCAGGAGATGTTTCAGCACTGTTGCCTTTAGTCTCGAGGCAACT
TAGACAACTGAGTATTGATCTGAGCACAGCAGGGTGTGAGCTGTTTGAAGATACTGGGGTTGGGAGTGAAGAAACTG
CAGAGGACTAACTGGGCTGAGACCCAGTGGCAATGTTTTAGGGCCTAAGGAGTGCCTCTGAAAATCTAGATGGACAA
CTTTGACTTTGAGAAAAGAGAGGTGGAAATGAGGAAAATGACTTTTCTTTATTAGATTTCGGTAGAAAGAACTTTCA
CCTTTCCCCTATTTTTGTTATTCGTTTTAAAACATCTATCTGGAGGCAGGACAAGTATGGTCGTTAAAAAGATGCAG
GCAGAAGGCATATATTGGCTCAGTCAAAGTGGGGAACTTTGGTGGCCAAACATACATTGCTAAGGCTATTCCTATAT
CAGCTGGACACATATAAAATGCTGCTAATGCTTCATTACAAACTTATATCCTTTAATTCCAGATGGGGGCAAAGTAT
GTCCAGGGGTGAGGAACAATTGAAACATTTGGGCTGGAGTAGATTTTGAAAGTCAGCTCTGTGTGTGTGTGTGTGTG
TGTGCGCGCGTGTGTTTGTGTGTGTGTGAGAGCGTGTGTTTCTTTTAACGTTTTCAGCCTACAGCATACAGGGTTCA
TGGTGGCAAGAAGATAACAAGATTTAAATTATGGCCAGTGACTAGTGCTGCAAGAAGAACAACTACCTGCATTTAAT
GGGAAAGCAAAATCTCAGGCTTTGAGGGAAGTTAACATAGGCTTGATTCTGGGTGGAAGCTTGGTGTGTAGTTATCT
GGAGGCCAGGCTGGAGCTCTCAGCTCACTATGGGTTCATCTTTATTGTCTCCTTTCATCTCAACAGCTCCTGGGAAA
TGTGCTGGTGACCGTTTTGGCAATCCATTTCGGCAAAGAATTCACCCCTGAGGTGCAGGCTTCCTGGCAGAAGATGG
TGACTGGAGTGGCCAGTGCCCTGTCCTCCAGATACCACTGAGCTCACTGCCCATGATGCAGAGCTTTCAAGGATAGG
CTTTATTCTGCAAGCAATACAAATAATAAATCTATTCTGCTAAGAGATCACACATGGTTGTCTTCAGTTCTTTTTTT
TATGTCTTTTTAAATATATGAGCCACAAAGGGTTTTATGTTGAGGGATGTGTTTATGTGTATTTATACATGGCTATG
TGTGTTTGTGTCATGTGCACACTCCACACTTTTTTGTTTACGTTAGATGTGGGTTTTGATGAGCAAATAAAAGAACT
AGGCAATAAAGAAACTTATACATGGGAGCGTCTGCAAGTGGGAGTAAAAGGTGCAGGAGAAATCTGGTTGGAAGAAA
GACCTCTATAGGACAGGACTCCTCAGAAACAGATGTTTTGGAAGAGATGGGGAAAGGTTCAGTGAAGGGGGCTGAAC
CCCCTTCCCTGGATTGCAGCACAGCAGCGAGGAAGGGGCTCAACGAAGAAAAAGTGTTCCAAGCTTTAGGAAGTCAA
GGTTTAGGCAGGGATAGCCATTCTATTTTATTAGGGGCAATACTATTTCCAACGGCATCTGGCTTTTCTCAGCCCTT
GTGAGGCTCTACGGGGAGGTTGAGGTGTTAGAGATCAGAGCAGGAAACAGGTTTTTCTTTCCACGGTAACTACAATG
AAGTGATCCTTACTTTACTAAGGAACTTTTTCATTTTAAGTGTTGACGCATGCCTAAAGAGGTGAAATTAATCCCAT
ACCCTTAAGTCTACAGACTGGTCACAGCATTTCAAGGAGGAGACCTCATTGTAAGCTTCTAGGGAGGTGGGGACCTA
GGTGAAGGAAATGAGCCAGCAGAAGCTCACAAGTCAGCATCAGCGTGTCATGTCTCAGCAGCAGAACAGCACGGTCA
GATGAAAATATAGTGTGAAGAATTTGTATAACATTAATTGAGAAGGCAGATTCACTGGAGTTCTTATATAATTGAAA
GTTAATGCACGTTAATAAGCAAGAGTTTAGTTTAATGTGATGGTGTTATGAACTTAACGCTTGTGTCTCCAGAAAAT
TCACATGCTGAATCCCCAACTCCCAATTGGCTCCATTTGTGGGGGAGGCTTTGGAAAAGTAATCAGGTTTAGAGGAG
CTCATGAGAGCAGATCCCCATCATAGAATTATTTTCCTCATCAGAAGCAGAGAGATTAGCCATTTCTCTTCCTTCTG
GTGAGGACACAGTGGGAAGTCAGCCACCTGCAACCCAGGAAGAGAGCCCTGACCAGGAACCAGCAGAAAAGTGAGAA
AAAATCCTGTTGTTGAAGTCACCCAGTCTATGCTATTTTGTTATAGCACCTTGCACTAAGTAAGGCAGATGAAGAAA
GAGAAAAAAATAAGCTTCGGTGTTCAGTGGATTAGAAACCATGTTTATCTCAGGTTTACAAATCTCCACTTGTCCTC
TGTGTTTCAGAATAAAATACCAACTCTACTACTCTCATCTGTAAGATGCAAATAGTAAGCCTGATCCCTTCTGTCTA
ACTTCGAATTCTATTTTTTCTTCAACGTACTTTAGGCTTGTAATGTGTTTATATACAGTGAAATGTCAAGTTCTTTC
TTTATATTTCTTTCTTTCTTTTTTTTCCTCAGCCTCAGAGTTTTCCACATGCCCTTCCTACCTTCAGGAACTTCTTT
CTCCAAACGTCTTCTGCCTGGCCTCCATTCAAATCATAAAGGACCCACTTCAAATGCCATCACTCACTACCATTTCA
CAATTCGCACTTTCTTTCTTTGTCCTTTTTTTTTTTAGTAAAACAAGTTTATAAAAAATTGAAGGAATAAATGAATG
GCTACTTCATAGGCAGAGTAGACACAAGGGCTACTGGTTGCCGATTTTTATTGTTATTTTTCAATAGTATGCTAAAC
AAGGGGTAGATTATTTATGCTGCCCATTTTTAGACCATAAAAGATAACTTCCTGATGTTGCCATGGCATTTTTTTTC
CTTTTAATTTTATTTCATTTCATTTTAATTTCGAAGGTACATGTGCAGGATGTGCAGGCTTGTTACATGGGTAAATG
TGTGTCTTTCTGGCCTTTTAGCCATCTGTATCAATGAGCAGATATAAGCTTTACACAGGATCATGAAGGATGAAAGA
ATTTCACCAATATTATAATAATTTCAATCAACCTGATAGCTTAGGGGATAAACTAATTTGAAGATACAGCTTGCCTC
CGATAAGCCAGAATTCCAGAGCTTCTGGCATTATAATCTAGCAAGGTTAGAGATCATGGATCACTTTCAGAGAAAAA
CAAAAACAAACTAACCAAAAGCAAAACAGAACCAAAAAACCTCCATAAATACTTCCTACCCAGTTAATGGTCCAATA
TGTCAGAAACAGCACTGTGTTAGAAATAAAGCTGTCTAAAGTACACTAATATTCGAGTTATAATAGTGTGTGGACTA
TTAGTCAATAAAAACAACCCTTGCCTCTTTAGAGTTGTTTTCCATGTACACGCACATCTTATGTCTTAGAGTAAGAT
TCCCTGAGAAGTGAACCTAGCATTTATACAAGATAATTAATTCTAATCCACAGTACCTGCCAAAGAACATTCTACCA
TCATCTTTACTGAGCATAGAAGAGCTACGCCAAAACCCTGGGTCATCAGCCAGCACACACACTTATCCAGTGGTAAA
TACACATCATCTGGTGTATACATACATACCTGAATATGGAATCAAATATTTTTCTAAGATGAAACAGTCATGATTTA
TTTCAAATAGGTACGGATAAGTAGATATTGAGGTAAGCATTAGGTCTTATATTATGTAACACTAATCTATTACTGCG
CTGAAACTGTGGTCTTTATGAAAATTGTTTTCACTACACTATTGAGAAATTAAGAGATAATGGCAAAAGTCACAAAG
AGTATATTCAAAAAGAAGTATAGCACTTTTTCCTTAGAAACCACTGCTAACTGAAAGAGACTAAGATTTGTCCCGTC
AAAAATCCTGGACCTATGCCTAAAACACATTTCACAATCCCTGAACTTTTCAAAAATTGGTACATGCTTTAGCTTTA
AACTACAGGCCTCACTGGAGCTACAGACAAGAAGGTAAAAAACGGCTGACAAAAGAAGTCCTGGTATCCTCTATGAT
GGGAGAAGGAAACTAGCTAAAGGGAAGAATAAATTAGAGAAAAACTGGAATGACTGAATCGGAACAAGGCAAAGGCT
ATAAAAAAAATTAAGCAGCAGTATCCTCTTGGGGGCCCCTTCCCCACACTATCTCAATGCAAATATCTGTCTGAAAC
GGTCCCTGGCTAAACTCCACCCATGGGTTGGCCAGCCTTGCCTTGACCAATAGCCTTGACAAGGCAAACTTGACCAA
TAGTCTTAGAGTATCCAGTGAGGCCAGGGGCCGGCGGCTGGCTAGGGATGAAGAATAAAAGGAAGCACCCTTCAGCA
GTTCCACACACTCGCTTCTGGAACGTCTGAGATTATCAATAAGCTCCTAGTCCAGACGCCATGGGTCATTTCACAGA
GGAGGACAAGGCTACTATCACAAGCCTGTGGGGCAAGGTGAATGTGGAAGATGCTGGAGGAGAAACCCTGGGAAGGT
AGGCTCTGGTGACCAGGACAAGGGAGGGAAGGAAGGACCCTGTGCCTGGCAAAAGTCCAGGTCGCTTCTCAGGATTT
GTGGCACCTTCTGACTGTCAAACTGTTCTTGTCAATCTCACAGGCTCCTGGTTGTCTACCCATGGACCCAGAGGTTC
TTTGACAGCTTTGGCAACCTGTCCTCTGCCTCTGCCATCATGGGCAACCCCAAAGTCAAGGCACATGGCAAGAAGGT
GCTGACTTCCTTGGGAGATGCCATAAAGCACCTGGATGATCTCAAGGGCACCTTTGCCCAGCTGAGTGAACTGCACT
GTGACAAGCTGCATGTGGATCCTGAGAACTTCAAGGTGAGTCCAGGAGATGTTTCAGCACTGTTGCCTTTAGTCTCG
AGGCAACTTAGACAACTGAGTATTGATCTGAGCACAGCAGGGTGTGAGCTGTTTGAAGATACTGGGGTTGGGAGTGA
AGAAACTGCAGAGGACTAACTGGGCTGAGACCCAGTGGCAATGTTTTAGGGCCTAAGGAGTGCCTCTGAAAATCTAG
ATGGACAACTTTGACTTTGAGAAAAGAGAGGTGGAAATGAGGAAAATGACTTTTCTTTATTAGATTTCGGTAGAAAG
AACTTTCACCTTTCCCCTATTTTTGTTATTCGTTTTAAAACATCTATCTGGAGGCAGGACAAGTATGGTCGTTAAAA
AGATGCAGGCAGAAGGCATATATTGGCTCAGTCAAAGTGGGGAACTTTGGTGGCCAAACATACATTGCTAAGGCTAT
TCCTATATCAGCTGGACACATATAAAATGCTGCTAATGCTTCATTACAAACTTATATCCTTTAATTCCAGATGGGGG
CAAAGTATGTCCAGGGGTGAGGAACAATTGAAACATTTGGGCTGGAGTAGATTTTGAAAGTCAGCTCTGTGTGTGTG
TGTGTGTGTGTGTGTGTCAGCGTGTGTTTCTTTTAACGTCTTCAGCCTACAACATACAGGGTTCATGGTGGGAAGAA
GATAGCAAGATTTAAATTATGGCCAGTGACTAGTGCTTGAAGGGGAACAACTACCTGCATTTAATGGGAAGGCAAAA
TCTCAGGCTTTGAGGGAAGTTAACATAGGCTTGATTCTGGGTGGAAGCTGGGTGTGTAGTTATCTGGAGGCCAGGCT
GGAGCTCTCAGCTCACTATGGGTTCATCTTTATTGTCTCCTTTCATCTCAACAGCTCCTGGGAAATGTGCTGGTGAC
CGTTTTGGCAATCCATTTCGGCAAAGAATTCACCCCTGAGGTGCAGGCTTCCTGGCAGAAGATGGTGACTGCAGTGG
CCAGTGCCCTGTCCTCCAGATACCACTGAGCCTCTTGCCCATGATTCAGAGCTTTCAAGGATAGGCTTTATTCTGCA
AGCAATACAAATAATAAATCTATTCTGCTGAGAGATCACACATGATTTTCTTCAGCTCTTTTTTTTACATCTTTTTA
AATATATGAGCCACAAAGGGTTTATATTGAGGGAAGTGTGTATGTGTATTTCTGCATGCCTGTTTGTGTTTGTGGTG
TGTGCATGCTCCTCATTTATTTTTATATGAGATGTGCATTTTGATGAGCAAATAAAAGCAGTAAAGACACTTGTACA
CGGGAGTTCTGCAAGTGGGAGTAAATGGTGTTGGAGAAATCCGGTGGGAAGAAAGACCTCTATAGGACAGGACTTCT
CAGAAACAGATGTTTTGGAAGAGATGGGAAAAGGTTCAGTGAAGACCTGGGGGCTGGATTGATTGCAGCTGAGTAGC
AAGGATGGTTCTTAATGAAGGGAAAGTGTTCCAAGCTTTAGGAATTCAAGGTTTAGTCAGGTGTAGCAATTCTATTT
TATTAGGAGGAATACTATTTCTAATGGCACTTAGCTTTTCACAGCCCTTGTGGATGCCTAAGAAAGTGAAATTAATC
CCATGCCCTCAAGTGTGCAGATTGGTCACAGCATTTCAAGGGAGAGACCTCATTGTAAGACTCTGGGGGAGGTGGGG
ACTTAGGTGTAAGAAATGAATCAGCAGAGGCTCACAAGTCAGCATGAGCATGTTATGTCTGAGAAACAGACCAGCAC
TGTGAGATCAAAATGTAGTGGGAAGAATTTGTACAACATTAATTGGAAGGTTTACTTAATGGAATTTTTGTATAGTT
GGATGTTAGTGCATCTCTATAAGTAAGAGTTTAATATGATGGTGTTACGGACCTGGTGTTTGTGTCTCCTCAAAATT
CACATGCTGAATCCCCAACTCCCAACTGACCTTATCTGTGGGGGAGGCTTTTGAAAAGTAATTAGGTTTAGCTGAGC
TCATAAGAGCAGATCCCCATCATAAAATTATTTTCCTTATCAGAAGCAGAGAGACAAGCCATTTCTCTTTCCTCCCG
GTGAGGACACAGTGAGAAGTCCGCCATCTGCAATCCAGGAAGAGAACCCTGACCACGAGTCAGCCTTCAGAAATGTG
AGAAAAAACTCTGTTGTTGAAGCCACCCAGTCTTTTGTATTTTGTTATAGCACCTTACACTGAGTAAGGCAGATGAA
GAAGGAGAAAAAAATAAGCTTGGGTTTTGAGTGAACTACAGACCATGTTATCTCAGGTTTGCAAAGCTCCCCTCGTC
CCCTATGTTTCAGCATAAAATACCTACTCTACTACTCTCATCTATAAGACCCAAATAATAAGCCTGCGCCCTTCTCT
CTAACTTTGATTTCTCCTATTTTTACTTCAACATGCTTTACTCTAGCCTTGTAATGTCTTTACATACAGTGAAATGT
AAAGTTCTTTATTCTTTTTTTCTTTCTTTCTTTTTTCTCCTCAGCCTCAGAATTTGGCACATGCCCTTCCTTCTTTC
AGGAACTTCTCCAACATCTCTGCCTGGCTCCATCATATCATAAAGGTCCCACTTCAAATGCAGTCACTACCGTTTCA
GGATATGCACTTTCTTTCTTTTTTGTTTTTTGTTTTTTTTAAGTCAAAGCAAATTTCTTGAGAGAGTAAAGAAATAA
ACGAATGACTACTGCATAGGCAGAGCAGCCCCGAGGGCCGCTGGTTGTTCCTTTTATGGTTATTTCTTGATGATATG
TTAAACAAGTTTTGGATTATTTATGCCTTCTCTTTTTAGGCCATATAGGGTAACTTTCTGACATTGCCATGGCATGT
TTCTTTTAATTTAATTTACTGTTACCTTAAATTCAGGGGTACACGTACAGGATATGCAGGTTTGTTTTATAGGTAAA
AGTGTGCCATGGTTTTAATGGGTTTTTTTTTTCTTGTAAAGTTGTTTAAGTTTCTTGTTTACTCTGGATATTGGCCT
TTGTCAGAAGAATAGATTGGAAAATCTTTTTCCCATTCTGTAGATTGTCTTTCGCTCTGATGGTAGTTTCTTTTGCT
GAGCAGGAGCTCTTTAGTTTAATTAGATTCCATTGGTCAATTTTTGCTTTTGCTGCAATTGCTTTTCACGCTTTCAT
CATGAAATCTGTGCCCGTGTTTATATCATGAATAGTATTGCCTTGATTTTTTTCTAGGCTTTTTATAGTTTGGGGTT
TTTCATTTAAGTCTCTAATCCATCCGGAGTTAATTTTGGATAAGGTATAAGGAAGGAGTCCAGTTTCATTTTTCAGC
ATATGGCTAGCCAGTTCTCCCCCATCATTTATTAAATTGAAAATCCTTTCCCCATTGCTTGCTTTTGTCAGGTTTCT
AAAAGACAGATGGTTGTAGGTACAATATGCAGTTTCTTCAAGTCATATAATACCATCTGAAATCTCTTATTAATTCA
TTTCTTTTAGTATGTATGCTGGTCTCCTCTGCTCACTATAGTGAGGGCACCATTAGCCAGAGAATCTGTCTGTCTAG
TTCATGTAAGATTCTCAGAATTAAGAAAAATGGATGGCATATGAATGAAACTTCATGGATGACATATGGAATCTAAT
GTGTATTTGTTGAATTAATGCATAAGATGCAACAAGGGAAAGGTTGACAACTGCAGTGATAACCTGGTATTGATGAT
ATAAGAGTCTATAGATCACAGTAGAAGCAATAATCATGGAAAACAATTGGAAATGGGGAACAGCCACAAACAAGAAA
GAATCAATACTACCAGGAAAGTGACTGCAGGTCACTTTTCCTGGAGCGGGTGAGAGAAAAGTGGAAGTTGCAGTAAC
TGCCGAATTCCTGGTTGGCTGATGGAAAGATGGGGCAACTGTTCACTGGTACGCAGGGTTTTAGATGTATGTACCTA
AGGATATGAGGTATGGCAATGAACAGAAATTCTTTTGGGAATGAGTTTTAGGGCCATTAAAGGACATGACCTGAAGT
TTCCTCTGAGGCCAGTCCCCACAACTCAATATAAATGTGTTTCCTGCATATAGTCAAAGTTGCCACTTCTTTTTCTT
CATATCATCGATCTCTGCTCTTAAAGATAATCTTGGTTTTGCCTCAAACTGTTTGTCACTACAAACTTTCCCCATGT
TCCTAAGTAAAACAGGTAACTGCCTCTCAACTATATCAAGTAGACTAAAATATTGTGTCTCTAATATCAGAAATTCA
GCTTTAATATATTGGGTTTAACTCTTTGAAATTTAGAGTCTCCTTGAAATACACATGGGGGTGATTTCCTAAACTTT
ATTTCTTGTAAGGATTTATCTCAGGGGTAACACACAAACCAGCATCCTGAACCTCTAAGTATGAGGACAGTAAGCCT
TAAGAATATAAAATAAACTGTTCTTCTCTCTGCCGGTGGAAGTGTGCCCTGTCTATTCCTGAAATTGCTTGTTTGAG
ACGCATGAGACGTGCAGCACATGAGACACGTGCAGCAGCCTGTGGAATATTGTCAGTGAAGAATGTCTTTGCCTGAT
TAGATATAAAGACAAGTTAAACACAGCATTAGACTATAGATCAAGCCTGTGCCAGACACAAATGACCTAATGCCCAG
CACGGGCCACGGAATCTCCTATCCTCTTGCTTGAACAGAGCAGCACACTTCTCCCCCAACACTATTAGATGTTCTGG
CATAATTTTGTAGATATGTAGGATTTGACATGGACTATTGTTCAATGATTCAGAGGAAATCTCCTTTGTTCAGATAA
GTACACTGACTACTAAATGGATTAAAAAACACAGTAATAAAACCCAGTTTTCCCCTTACTTCCCTAGTTTGTTTCTT
ATTCTGCTTTCTTCCAAGTTGATGCTGGATAGAGGTGTTTATTTCTATTCTAAAAAGTGATGAAATTGGCCGGGCGC
GGTGGCTCACACCTGTAATCCCAGCACTTTGGGAGGCTGAGGTGGGCGGATCACGAGGTCAGGAGATCAAGACCATC
CTGGCTAACATGGTGAAACCCCATCTCTACTAAAAATACAAAAAATTAGCCAGAGACGGTGGCGGGTGCCTGTAGTC
CCAGCTACTCGGGAGGCTGAGGCAGGAGAATGGCGTGAACCTGGGAGGCAGAGCTGCAGTGAGCAGAGATCGCGCCA
CTGCACACTCCAGCCTGGGTGACAAAGCGAGACTCCATCTCAAAAAAAAAAAAAAAAAAAAAAAGAAAGAAAGAAAG
AAAAAAAAAGTGATGAAATTGTGTATTCAATGTAGTCTCAAGAGAATTGAAAACCAAGAAAGGCTGTGGCTTCTTCC
ACATAAAGCCTGGATGAATAACAGGATAACACGTTGTTACATTGTCACAACTCCTGATCCAGGAATTGATGGCTAAG
ATATTCGTAATTCTTATCCTTTTCAGTTGTAACTTATTCCTATTTGTCAGCATTCAGGTTATTAGCGGCTGCTGGCG
AAGTCCTTGAGAAATAAACTGCACACTGGATGGTGGGGGTAGTGTAGGAAAATGGAGGGGAAGGAAGTAAAGTTTCA
AATTAAGCCTGAACAGCAAAGTTCCCCTGAGAAGGCCACCTGGATTCTATCAGAAACTCGAATGTCCATCTTGCAAA
ACTTCCTTGCCCAAACCCCACCCCTGGAGTCACAACCCACCCTTGACCAATAGATTCATTTCACTGAGGGAGGCAAA
GGGCTGGTCAATAGATTCATTTCACTGGGAGAGGCAAAGGGCTGGGGGCCAGAGAGGAGAAGTAAAAAGCCACACAT
GAAGCAGCAATGCAGGCATGCTTCTGGCTCATCTGTGATCACCAGGAAACTCCCAGATCTGACACTGTAGTGCATTT
CACTGCTGACAAGAAGGCTGCTGCCACCAGCCTGTGAAGCAAGGTTAAGGTGAGAAGGCTGGAGGTGAGATTCTGGG
CAGGTAGGTACTGGAAGCCGGGACAAGGTGCAGAAAGGCAGAAAGTGTTTCTGAAAGAGGGATTAGCCCGTTGTCTT
ACATAGTCTGACTTTGCACCTGCTCTGTGATTATGACTATCCCACAGTCTCCTGGTTGTCTACCCATGGACCTAGAG
GTACTTTGAAAGTTTTGGATATCTGGGCTCTGACTGTGCAATAATGGGCAACCCCAAAGTCAAGGCACATGGCAAGA
AGGTGCTGATCTCCTTCGGAAAAGCTGTTATGCTCACGGATGACCTCAAAGGCACCTTTGCTACACTGAGTGACCTG
CACTGTAACAAGCTGCACGTGGACCCTGAGAACTTCCTGGTGAGTAGTAAGTACACTCACGCTTTCTTCTTTACCCT
TAGATATTTGCACTATGGGTACTTTTGAAAGCAGAGGTGGCTTTCTCTTGTGTTATGAGTCAGCTATGGGATATGAT
ATTTCAGCAGTGGGATTTTGAGAGTTATGTTGCTGTAAATAACATAACTAAAATTTGGTAGAGCAAGGACTATGAAT
AATGGAAGGCCACTTACCATTTGATAGCTCTGAAAAACACATCTTATAAAAAATTCTGGCCAAAATCAAACTGAGTG
TTTTGGATGAGGGAACAGAAGTTGAGATAGAGAAAATAACATCTTTCCTTTGGTCAGCGAAATTTTCTATAAAAATT
AATAGTCACTTTTCTGCATAGTCCTGGAGGTTAGAAAAAGATCAACTGAACAAAGTAGTGGGAAGCTGTTAAAAGAG
GATTGTTTCCCTCCGAATGATGATGGTATACTTTTGTACGCATGGTACAGGATTCTTTGTTATGAGTGTTTGGGAAA
ATTGTATGTATGTATGTATGTATGTGATGACTGGGGACTTATCCTATCCATTACTGTTCCTTGAAGTACTATTATCC
TACTTTTTAAAAGGACGAAGTCTCTAAAAAAAAAATGAAACAATCACAATATGTTGGGGTAGTGAGTTGGCATAGCA
AGTAAGAGAAGGATAGGACACAATGGGAGGTGCAGGGCTGCCAGTCATATTGAAGCTGATATCTAGCCCATAATGGT
GAGAGTTGCTCAAACTCTGGTCAAAAAGGATGTAAGTGTTATATCTATTTACTGCAAGTCCAGCTTGAGGCCTTCTA
TTCACTATGTACCATTTTCTTTTTTATCTTCACTCCCTCCCCAGCTCTTAGGCAACGTGATATTGATTGTTTTGGCA
ACCCACTTCAGCGAGGATTTTACCCTACAGATACAGGCTTCTTGGCAGTAACTAACAAATGCTGTGGTTAATGCTGT
AGCCCACAAGACCACTGAGTTCCCTGTCCACTATGTTTGTACCTATGTCCCAAAATCTCATCTCCTTTAGATGGGGG
AGGTTGGGGAGAAGAGCAGTATCCTGCCTGCTGATTCAGTTCCTGCATGATAAAAATAGAATAAAGAAATATGCTCT
CTAAGAAATATCATTGTACTCTTTTTCTGTCTTTATATTTTACCCTGATTCAGCCAAAAGGACGCACTATTTCTGAT
GGAAATGAGAATGTTGGAGAATGGGAGTTTAAGGACAGAGAAGATACTTTCTTGCAATCCTGCAAGAAAAGAGAGAA
CTCGTGGGTGGATTTAGTGGGGTAGTTACTCCTAGGAAGGGGAAATCGTCTCTAGAATAAGACAATGTTTTTACAGA
AAGGGAGGTCAATGGAGGTACTCTTTGGAGGTGTAAGAGGATTGTTGGTAGTGTGTAGAGGTATGTTAGGACTCAAA
TTAGAAGTTCTGTATAGGCTATTATTTGTATGAAACTCAGGATATAGCTCATTTGGTGACTGCAGTTCACTTCTACT
TATTTTAAACAACATATTTTTTATGATTTATAATGAAGTGGGGATGGGGCTTCCTAGAGACCAATCAAGGGCCAAAC
CTTGAACTTTCTCTTAACGTCTTCAATGGTATTAATAGAGAATTATCTCTAAGGCATGTGAACTGGCTGTCTTGGTT
TTCATCTGTACTTCATCTGCTACCTCTGTGACCTGAAACATATTTATAATTCCATTAAGCTGTGCATATGATAGATT
TATCATATGTATTTTCCTTAAAGGATTTTTGTAAGAACTAATTGAATTGATACCTGTAAAGTCTTTATCACACTACC
CAATAAATAATAAATCTCTTTGTTCAGCTCTCTGTTTCTATAAATATGTACAAGTTTTATTGTTTTTAGTGGTAGTG
ATTTTATTCTCTTTCTATATATATACACACACATGTGTGCATTCATAAATATATACAATTTTTATGAATAAAAAATT
ATTAGCAATCAATATTGAAAACCACTGATTTTTGTTTATGTGAGCAAACAGCAGATTAAAAGGCTGAGATTTAGGAA
ACAGCACGTTAAGTCAAGTTGATAGAGGAGAATATGGACATTTAAAAGAGGCAGGATGATATAAAATTAGGGAAACT
GGATGCAGAGACCAGATGAAGTAAGAAAAATAGCTATCGTTTTGAGCAAAAATCACTGAAGTTTCTTGCATATGAGA
GTGACATAATAAATAGGGAAACGTAGAAAATTGATTCACATGTATATATATATATAGAACTGATTAGACAAAGTCTA
ACTTGGGTATAGTCAGAGGAGCTTGCTGTAATTATATTGAGGTGATGGATAAAGAACTGAAGTTGATGGAAACAATG
AAGTTAAGAAAAAAAATCGAGTAAGAGACCATTGTGGCAGTGATTGCACAGAACTGGAAAACATTGTGAAACAGAGA
GTCAGAGATGACAGCTAAAATCCCTGTCTGTGAATGAAAAGAAGGAAATTTATTGACAGAACAGCAAATGCCTACAA
GCCCCCTGTTTGGATCTGGCAATGAACGTAGCCATTCTGTGGCAATCACTTCAAACTCCTGTACCCAAGACCCTTAG
GAAGTATGTAGCACCCTCAAACCTAAAACCTCAAAGAAAGAGGTTTTAGAAGATATAATACCCTTTCTTCTCCAGTT
TCATTAATCCCAAAACCTCTTTCTCAAAGTATTTCCTCTATGTGTCCACCCCAAAGAGCTCACCTCACCATATCTCT
TGAGTGGGAGCACATAGATAGGCGGTGCTACCATCTAACAGCTTCTGAAATTCCTTTGTCATATTTTTGAGTCCCCA
CTAATAACCCACAAAGCAGAATAAATACCAGTTGCTCATGTACAATAATCACTCAACTGCTGTCTTGTAGCATACAT
TAATTAAGCACATTCTTTGAATAATTACTGTGTCCAAACAATCACACTTTAAAATCTCACACTTGTGCTATCCCTTG
CCCTTCTGAATGTCACTCTGTATTTTAAATGAAGAGATGAGGGTTGAATTTCCTGTGTTACTTATTGTTCATTTCTC
GATGAGGAGTTTTCACATTCACCTTTACTGGAAAACACATAAGTACACATCTTACAGGAAAAATATACCAAACTGAC
ATGTAGCATGAATGCTTGTGCATGTAGTCATATAAAATCTTGTAGCAATGTAAACATTCTCTGATATACACATACAG
ATGTGTCTATATGTCTACACAATTTCTTATGCTCCATGAACAAACATTCCATGCACACATAAGAACACACACTGTTA
CAGATGCATACTTGAGTGCATTGACAAAATTACCCCAGTCAATCTAGAGAATTTGGATTTCTGCATTTGACTCTGTT
AGCTTTGTACATGCTGTTCATTTACTCTGGGTGATGTCTTTCCCTCATTTTGCCTTGTCTATCTTGTACTCATACTT
TAAGTCCTAACTTATATGTTATCTCAACTAAGAAGCTATTTTTTTTTAATTTTAACTGGGCTTAAAGCCCTGTCTAT
AAACTCTGCTACAATTATGGGCTCTTTCTTATAATATTTAGTGTTTTTCCTACTAATGTACTTAATCTGCTCATTGT
ATATTCCTACCACTAAATTTTAACCTCTTTTATGGTAGAGACATTGTCTTGTAAACTCTTATTTCCCTAGTATTTGG
AGATGAAAAAAAAGATTAAATTATCCAAAATTAGATCTCTCTTTTCTACATTATGAGTATTACACTATCCATAGGGA
AGTTTGTTTGAGACCTAAACTGAGGAACCTTTGGTTCTAAAATGACTATGTGATATCTTAGTATTTATAGGTCATGA
GGTTCCTTCCTCTGCCTCTGCTATAGTTTGATTAGTCAGCAAGCATGTGTCATGCATTTATTCACATCAGAATTTCA
TACACTAATAAGACATAGTATCAGAAGTCAGTTTATTAGTTATATCAGTTAGGGTCCATCAAGGAAAGGACAAACCA
TTATCAGTTACTCAACCTAGAATTAAATACAGCTCTTAATAGTTAATTATCCTTGTATTGGAAGAGCTAAAATATCA
AATAAAGGACAGTGCAGAAATCTAGATGTTAGTAACATCAGAAAACCTCTTCCGCCATTAGGCCTAGAAGGGCAGAA
GGAGAAAATGTTTATACCACCAGAGTCCAGAACCAGAGCCCATAACCAGAGGTCCACTGGATTCAGTGAGCTAGTGG
GTGCTCCTTGGAGAGAGCCAGAACTGTCTAATGGGGGCATCAAAGTATCAGCCATAAAAAACCATAAAAAAGACTGT
CTGCTGTAGGAGATCCGTTCAGAGAGAGAGAGAGACCAGAAATAATCTTGCTTATGCTTTCCCTCAGCCAGTGTTTA
CCATTGCAGAATGTACATGCGACTGAAAGGGTGAGGAAACCTGGGAAATGTCAGTTCCTCAAATACAGAGAACACTG
AGGGAAGGATGAGAAATAAATGTGAAAGCAGACATGAATGGTAATTGACAGAAGGAAACTAGGATGTGTCCAGTAAA
TGAATAATTACAGTGTGCAGTGATTATTGCAATGATTAATGTATTGATAAGATAATATGAAAACACAGAATTCAAAC
AGCAGTGAACTGAGATTAGAATTGTGGAGAGCACTGGCATTTAAGAATGTCACACTTAGAATGTGTCTCTAGGCATT
GTTCTGTGCATATATCATCTCAATATTCATTATCTGAAAATTATGAATTAGGTACAAAGCTCAAATAATTTATTTTT
TCAGGTTAGCAAGAACTTTTTTTTTTTTTTTTTCTGAGATGGAGCATTGCTATGGTTGCCCAGGCTGGAGTGCAATG
GCATGATCCAGGCTCACTGCAACATCTGCCTCCCAGGTTCAAGCGATTCTCCTGCCTCAGCCTCCCAAGTAGCTGGC
ATTACAGGCATGTGCCACCACCATGCCTGGCTAATTTTCTATTTTTAGTAGATAGGGGGTTTCACCATGTTGGTCAG
GCTGATCTCGAACTCCTAACATCAGGTGATCCACCCTCCTCGGCCTCTGAATGTACTGGGATCACAGGCGTGAGCCA
CCACACCCAGCCAAGAATGTGAATTTTGTAGAAGGATATAACCCATATTTCTCTGACCCTAGAGTCCTTAGTATACC
TCCCATACCATGTGGCTCATCCTCCTTACATACATTTCCCATCTTTCACCCTACCTTTTCCTTTTTGTTTCAGCTTT
TCACTGTGTGTCAAAATCTAGAACCTTATCTCCTACCTGCTCTGAAACCAACAGCAAGTTGACTTCCATTCTAACCC
ACATTGGCATTACACTAATTAAAATCGATACTGAGTTCTAAAATCATCTGGGATTTTGGGGACTATGTCTTACTTCA
TACTTCCTTGAGATTTCACATTAAATGTTGGTGTTCATTAAAGGTCCTTCATTTAACTTTGTATTCATCACACTCTT
GGATTCACAGTTATATCTAAACTCTTATATATAGCCTGTATAATCCCAATTCCCAAGTCTGATTTCTAACCTCTGAC
CTCCAACCTCAGTGCCAAACCCATATATCAAACAATGTACTGGGCTTATTTATATAGATGTCCTATAGGCACCTCAG
ACTCAGCATGGGTATTTCACTTGTTATACTAAAACTGTTTCTCTTCCAGTGTTTTCCATTTTAGTCATTAGATAGCT
ACTTGCCCATTCACCAAGGTCACAGATTAAAATCATTTCCCTACCTCTAATCAACAGTTCAATTCTGCTTCAATTTG
TCCCTATCTATTAATCACCACTCTTACTGCCCAGTCAGGTCCTCATTGTTTCCTGAACAAGAGTAGATGCTATTCTT
TCCACTTTAAGACCTTATCCTGGCTGGATGCGGTGGCTCAGGCTTGTAAACCCAGCACTTTGGGAGGCCGAGGCAGG
CAGATCACTTGAGGTCAGGAGTTCAAGACCAGCCTGACCAACATGGTGAAACCCCATCTCTACTAAAAATACAAAAT
CAGCCGGGCGTGTGGTGCATGCCTGCAGTCCCAGCTATTCAGGTGGCTGAGGCAGGAGAATTGCTTGAACCCAGGAG
GCGGAGGTTGCGGTGAGCCTAGATTGCACCATTGCACTCTAGCTTGGGCAATAGGGATGAAACTCCATCTCAGAAGA
GAAAAGAAAAAAAGACCTTATTCTGTTACACAAATCCTCTCAATGCAATCCATATAGAATAAACATGTAACCAGATC
TCCCAATGTGTAAAATCATTTCAGGTAGAACAGAATTAAAGTGAAAAGCCAAGTCTTTGGAATTAACAGACAAAGTT
CAAATAACAGTCCTCATGGCCTTAAGAATTTACCTAACATTTTTTTTAGAATCAATTTTCTTATATATGAATTGGAA
ACATAATTCCTCCCTCACAAACACATTCTAAGATTTTAAGGAGATATTGATGAAGTACATCATCTGTCATTTTTAAC
AGTTAGTGGTAGTGATTCACACAGCACATTATGATCTGTTCTTGTATGTTCTGTTCCATTCTGTATTCTTGACCTGG
TTGTATTCTTTCTGAGCTCCAGATCCACATATCTAAGTACATCTTTTTGCATTTTACAAGAGTGCATACAATACAAT
GTATCCAAGACTGTATTTCTGATTTTATCGTACCACTAAACTCACAAATGTGGCCCTATTCTTGTGTTCACGACTGA
CATCACCGTCATGGTCCAAGTCTGATAATAGAAATGGCATTGTCACTTTCTTCCCTACTGCAACAGAAGCCCAGCTA
TTTGTCTCCCATTTTCTCTACTTCTAAAATACATTTCTTCACTAAGTGAGAATAATCTTTTAAAGACACAAATCAAA
CCATGCCACCACCTTTCTTGAATTATTCAATATCTTTCGTTGGCTTCCAGGTTACAGAAAAATAACTTGTAACAAAG
TTTAAAGGTCATTCATGGCTCCTCTCTACCCTATTTTATAACATTTCCCCTTGTGATCAGAATCTCAGGCACATCAT
CCATCTTTCTATATACAAATAAAGTCATATAGTTTGAACTCACCTCTGGTTACTTTTAATCAACCAAATGCTGTAAA
ATGCATTTGTATCGCTACGTGTTAAGCAGTAGTTGATTCTTTTCATTTCTTGTTAATATTCTATTCTTTGACTATAC
CGTAATTTATCAATTCTACTGTTGGTAAGCATTTAAGTGGCTACCGGTTTGAGGTTTTTATGATTATTGCTGTCATA
AGCATTTCTATACATGTCTTTGGATACACACATGCATGTGTTTCTGAATATCTAAAAATGTAATTGCTAGGTAATAG
ACTTATCAAGCATCCAGCATTTGTGGATACTATTAAAGGTTTTCCAAAGGGGTTATACTATTGTACAGTGTCACCAA
CAGAGTTTGAGTTTCTATTGATCCATATCACCACCAAAATTTGAACTGTCAGTCTTATCTCTTCTCTTGTCTCTTTT
TTCCTCTTTTTTTTCCTTCCCTTCCCCTCTCTTCGTTTCTTTTCTCTCCTCTTCTCTTCTTTCCTCTCTTCCCTTCC
CTTTCTCTTTCTCTTCCCTATCCCTTCTCCTCTCCTCTCCCCTCCTTTTTTCTCCTCTCCTCTCCATTATTTATTTT
TCCTTCTTCTCCTCCATCCCTTCCATCCTCTCTCTTCCCCTCTTCCTTCCTTCCTTTCTCCATTTCTTCCTCCTCTT
TCCCTCAATCCTTCCTTTTGGATATGCTCATGGGTGTGTATTTGTCTGCCATTGTGGCATTATTTGAATTCAGAAAA
GAGTGAAAAACTACTGGGATCTTCATTCTGGGTCTAATTCCACATTTTTTTTTAAGAACACACTCTGTAAAAATGTT
CTGTACTAGCATATTCCCAGGAACTTCGTTAAATTTAATCTGGCTGAATATGGTAAATCTACTTTGCACTTTGCATT
CTTTCTTTAGTCATACCATAATTTTAAACATTCAAAATATTTGTATATAATATTTGATTTTATCTGTCATTAAAATG
TTAACCTTAAAATTCATGTTTCCAGAACCTATTTCAATAACTGGTAAATAAACACTATTCATTTTTTAAATATTCTT
TTAATGGATATTTATTTCAATATAATAAAAAATTAGAGTTTTATTATAGGAAGAATTTACCAAAAGAAGGAGGAAGC
AAGCAAGTTTAAACTGCAGCAATAGTTGTCCATTCCAACCTCTCAAAATTCCCTTGGAGACAAAATCTCTAGAGGCA
AAGAAGAACTTTATATTGAGTCAACTTGTTAAAACATCTGCTTTTAGATAAGTTTTCTTAGTATAAAGTGACAGAAA
CAAATAAGTTAAACTCTAAGATACATTCCACTATATTAGCCTAAAACACTTCTGCAAAAATGAAACTAGGAGGATAT
TTTTAGAAACAACTGCTGAAAGAGATGCGGTGGGGAGATATGCAGAGGAGAACAGGGTTTCTGAGTCAAGACACACA
TGACAGAACAGCCAATCTCAGGGCAAGTTAAGGGAATAGTGGAATGAAGGTTCATTTTTCATTCTCACAAACTAATG
AAACCCTGCTTATCTTAAACCAACCTGCTCACTGGAGCAGGGAGGACAGGACCAGCATAAAAGGCAGGGCAGAGTCG
ACTGTTGCTTACACTTTCTTCTGACATAACAGTGTTCACTAGCAACCTCAAACAGACACCATGGTGCATCTGACTCC
TGAGGAGAAGACTGCTGTCAATGCCCTGTGGGGCAAAGTGAACGTGGATGCAGTTGGTGGTGAGGCCCTGGGCAGGT
TGGTATCAAGGTTATAAGAGAGGCTCAAGGAGGCAAATGGAAACTGGGCATGTGTAGACAGAGAAGACTCTTGGGTT
TCTGATAGGCACTGACTCTCTGTCCCTTGGGCTGTTTTCCTACCCTCAGATTACTGGTGGTCTACCCTTGGACCCAG
AGGTTCTTTGAGTCCTTTGGGGATCTGTCCTCTCCTGATGCTGTTATGGGCAACCCTAAGGTGAAGGCTCATGGCAA
GAAGGTGCTAGGTGCCTTTAGTGATGGCCTGGCTCACCTGGACAACCTCAAGGGCACTTTTTCTCAGCTGAGTGAGC
TGCACTGTGACAAGCTGCACGTGGATCCTGAGAACTTCAGGGTGAGTCCAGGAGATGCTTCACTTTTCTCTTTTTAC
TTTCTAATCTTACATTTTGGTTCTTTTACCTACCTGCTCTTCTCCCACATTTTTGTCATTTTACTATATTTTATCAT
TTAATGCTTCTAAAATTTTGTTAATTTTTTATTTAAATATTCTGCATTTTTTCCTTCCTCACAATCTTGCTATTTTA
AATTATTTAATATCCTGTCTTTCTCTCCCAACCCCCTCCCTTCATTTTTCCTTCTCTAACAACAACTCAAATTATGC
ATACCAGCTCTCACCTGCTAATTCTGCACTTAGAATAATCCTTTTGTCTCTCCACATGGGTATGGGAGAGGCTCCAA
CTCAAAGATGAGAGGCATAGAATACTGTTTTAGAGGCTATAAATCATTTTACAATAAGGAATAATTGGAATTTTATA
AATTCTGTAGTAAATGGAATGGAAAGGAAAGTGAATATTTGATTATGAAAGACTAGGCAGTTACACTGGAGGTGGGG
CAGAAGTCGTTGCTAGGAGACAGCCCATCATCACACTGATTAATCAATTAATTTGTATCTATTAATCTGTTTATAGT
AATTAATTTGTATATGCTATATACACATACAAAATTAAAACTAATTTGGAATTAATTTGTATATAGTATTATACAGC
ATATATAGCATATATGTACATATATAGACTACATGCTAGTTAAGTACATAGAGGATGTGTGTGTATAGATATATGTT
ATATGTATGCATTCATATATGTACTTATTTATGCTGATGGGAATAACCTGGGGATCAGTTTTGTCTAAGATTTGGGC
AGAAAAAAATGGGTGTTGGCTCAGTTTCTCAGAAGCCAGTCTTTATTTCTCTGTTAACCATATGCATGTATCTGCCT
ACCTCTTCTCCGCAGCTCTTGGGCAATGTGCTGGTGTGTGTGCTGGCCCGCAACTTTGGCAAGGAATTCACCCCACA
AATGCAGGCTGCCTATCAGAAGGTGGTGGCTGGTGTGGCTAATGCCCTGGCTCACAAGTACCATTGAGATCCTGGAC
TGTTTCCTGATAACCATAAGAAGACCCTATTTCCCTAGATTCTATTTTCTGAACTTGGGAACACAATGCCTACTTCA
AGGGTATGGCTTCTGCCTAATAAAGAATGTTCAGCTCAACTTCCTGATTAATTTCACTTATTTCATTTTTTTGTCCA
GGTGTGTAAGAAGGTTCCTGAGGCTCTACAGATAGGGAGCACTTGTTTATTTTACAAAGAGTACATGGGAAAAGAGA
AAAGCAAGGGAACCGTACAAGGCATTAATGGGTGACACTTCTACCTCCAAAGAGCAGAAATTATCAAGAACTCTTGA
TACAAAGATAATACTGGCACTGCAGAGGTTCTAGGGAAGACCTCAACCCTAAGACATAGCCTCAAGGGTAATAGCTA
CGATTAAACTCCAACAATTACTGAGAAAATAATGTGCTCAATTAAAGGCATAATGATTACTCAAGACAATGTTATGT
TGTCTTTCTTCCTCCTTCCTTTGCCTGCACATTGTAGCCCATAATACTATACCCCATCAAGTGTTCCTGCTCCAAGA
AATAGCTTCCTCCTCTTACTTGCCCCAGAACATCTCTGTAAAGAATTTCCTCTTATCTTCCCATATTTCAGTCAAGA
TTCATTGCTCACGTATTACTTGTGACCTCTCTTGACCCCAGCCACAATAAACTTCTCTATACTACCCAAAAAATCTT
TCCAAACCCTCCCCGACACCATATTTTTATATTTTTCTTATTTATTTCATGCACACACACACACTCCGTGCTTTATA
AGCAATTCTGCCTATTCTCTACCTTCTTACAATGCCTACTGTGCCTCATATTAAATTCATCAATGGGCAGAAAGAAA
ATATTTATTCAAGAAAACAGTGAATGAATGAACGAATGAGTAAATGAGTAAATGAAGGAATGATTATTCCTTGCTTT
AGAACTTCTGGAATTAGAGGACAATATTAATAATACCATCGCACAGTGTTTCTTTGTTGTTAATGCTACAACATACA
AAGAGGAAGCATGCAGTAAACAACCGAACAGTTATTTCCTTTCTGATCATAGGAGTAATATTTTTTTCCTTGAGCAC
ATTTTTGCCATAGGTAAAATTAGAAGGATTTTTAGAACTTTCTCAGTTGTATACATTTTTAAAAATCTGTATTATAT
GCATGTTGATTAATTTTAAACTTACTTGAATACCTAAACAGAATCTGTTGTTTCCTTGTGTTTGAAAGTGCTTTCAC
AGTAACTCTGTCTGTACTGCCAGAATATACTGACAATGTGTTATAGTTAACTGTTTTGATCACAACATTTTGAATTG
ACTGGCAGCAGAAGCTCTTTTTATATCCATGTGTTTTCCTTAAGTCATTATACATAGTAGGCATGAGACTCTTTATA
CTGAATAAGATATTTAGGAACCACTGGTTTACATATCAGAAGCAGAGCTACTCAGGGCATTTTGGGGAAGATCACTT
TCACATTCCTGAGCATAGGGAAGTTCTCATAAGAGTAAGATATTAAAAGGAGATACTTGTGTGGTATTCGAAAGACA
GTAAGAGAGATTGTAGACCTTATGATCTTGATAGGGAAAACAAACTACATTCCTTTCTCCAAAAGTCAAAAAAAAAG
AGCAAATATAGCTTACTATACCTTCTATTCCTACACCATTAGAAGTAGTCAGTGAGTCTAGGCAAGATGTTGGCCCT
AAAAATCCAAATACCAGAGAATTCATGAGAACATCACCTGGATGGGACATGTGCCGAGCAACACAATTACTATATGC
TAGGCATTGCTATCTTCATATTGAAGATGAGGAGGTCAAGAGATGAAAAAAGACTTGGCACCTTGTTGTTATATTAA
AATTATTTGTTAGAGTAGAGCTTTTGTAAGAGTCTAGGAGTGTGGGAGCTAAATGATGATACACATGGACACAAAGA
ATAGATCAACAGACACCCAGGCCTACTTGAGGGTTGAGGGTGGGAAGAGGGAGACGATGAAAAAGAACCTATTGGGT
ATTAAGTTCATCACTGAGTGATGAAATAATCTGTACATCAAGACCCAGTGATATGCAATTTACCTATATAACTTGTA
CATGTACCCCCAAATTTAAAATAAAGTTAAAACAAAGTATAGGAATGGAATTAATTCCTCAAGATTTGGCTTTAATT
TTATTTGATAATTTATCAAATGGTTGTTTTTCTTTTCTCACTATGGCGTTGCTTTATAAACTATGTTCAGTATGTCT
GAATGAAAGGGTGTGTGTGTGTGTGAAAGAGAGGGAGAGAGGAAGGGAAGAGAGGACGTAATAATGTGAATTTGAGT
TCATGAAAATTTTTCAATAAAATAATTTAATGTCAGGAGAATTAAGCCTAATAGTCTCCTAAATCATCCATCTCTTG
AGCTTCAGAGCAGTCCTCTGAATTAATGCCTACATGTTTGTAAAGGGTGTTCAGACTGAAGCCAAGATTCTACCTCT
AAAGAGATGCAATCTCAAATTTATCTGAAGACTGTACCTCTGCTCTCCATAAATTGACACCATGGCCCACTTAATGA
GGTTAAAAAAAAGCTAATTCTGAATGAAAATCTGAGCCCAGTGGAGGAAATATTAATGAACAAGGTGCAGACTGAAA
TATAAATTTTCTGTAATAATTATGCATATACTTTAGCAAAGTTCTGTCTATGTTGACTTTATTGCTTTTGGTAAGAA
ATACAACTTTTTAAAGTGAACTAAACTATCCTATTTCCAAACTATTTTGTGTGTGTGCGGTTTGTTTCTATGGGTTC
TGGTTTTCTTGGAGCATTTTTATTTCATTTTAATTAATTAATTCTGAGAGCTGCTGAGTTGTGTTTACTGAGAGATT
GTGTATCTGCGAGAGAAGTCTGTAGCAAGTAGCTAGACTGTGCTTGACCTAGGAACATATACAGTAGATTGCTAAAA
TGTCTCACTTGGGGAATTTTAGACTAAACAGTAGAGCATGTATAAAAATACTCTAGTCAAGTGCTGCTTTTGAAACA
AATGATAAAACCACACTCCCATAGATGAGTGTCATGATTTTCATGGAGGAAGTTAATATTCATCCTCTAAGTATACC
CAGACTAGGGCCATTCTGATATAAAACATTAGGACTTAAGAAAGATTAATAGACTGGAGTAAAGGAAATGGACCTCT
GTCTCTCTCGCTGTCTCTTTTTTGAGGACTTGTGTGTGTGTGTGTGTGTGTGTGTGTGTGTGTTGTGGTCAGTGGGG
CTGGAATAAAAGTAGAATAGACCTGCACCTGCTGTGGCATCCATTCACAGAGTAGAAGCAAGCTCACAATAGTGAAG
ATGTCAGTAAGCTTGAATAGTTTTTCAGGAACTTTGAATGCTGATTTAGATTTGAAACTGAGGCTCTGACCATAACC
AAATTTGCACTATTTATTGCTTCTTGAAACTTATTTGCCTGGTATGCCTGGGCTTTTGATGGTCTTAGTATAGCTTG
CAGCCTTGTCCCTGCAGGGTATTATGGGTAATAGAAAGAAAAGTCTGCGTTACACTCTAGTCACACTAAGTAACTAC
CATTGGAAAAGCAACCCCTGCCTTGAAGCCAGGATGATGGTATCTGCAGCAGTTGCCAACACAAGAGAAGGATCCAT
AGTTCATCATTTAAAAAAGAAAACAAAATAGAAAAAGGAAAACTATTTCTGAGCATAAGAAGTTGTAGGGTAAGTCT
TTAAGAAGGTGACAATTTCTGCCAATCAGGATTTCAAAGCTCTTGCTTTGACAATTTTGGTCTTTCAGAATACTATA
AATATAACCTATATTATAATTTCATAAAGTCTGTGCATTTTCTTTGACCCAGGATATTTGCAAAAGACATATTCAAA
CTTCCGCAGAACACTTTATTTCACATATACATGCCTCTTATATCAGGGATGTGAAACAGGGTCTTGAAAACTGTCTA
AATCTAAAACAATGCTAATGCAGGTTTAAATTTAATAAAATAAAATCCAAAATCTAACAGCCAAGTCAAATCTGTAT
GTTTTAACATTTAAAATATTTTAAAGACGTCTTTTCCCAGGATTCAACATGTGAAATCTTTTCTCAGGGATACACGT
GTGCCTAGATCCTCATTGCTTTAGTTTTTTACAGAGGAATGAATATAAAAAGAAAATACTTAAATTTTATCCCTCTT
ACCTCTATAATCATACATAGGCATAATTTTTTAACCTAGGCTCCAGATAGCCATAGAAGAACCAAACACTTTCTGCG
TGTGTGAGAATAATCAGAGTGAGATTTTTTCACAAGTACCTGATGAGGGTTGAGACAGGTAGAAAAAGTGAGAGATC
TCTATTTATTTAGCAATAATAGAGAAAGCATTTAAGAGAATAAAGCAATGGAAATAAGAAATTTGTAAATTTCCTTC
TGATAACTAGAAATAGAGGATCCAGTTTCTTTTGGTTAACCTAAATTTTATTTCATTTTATTGTTTTATTTTATTTT
ATTTTATTTTATTTTGTGTAATCGTAGTTTCAGAGTGTTAGAGCTGAAAGGAAGAAGTAGGAGAAACATGCAAAGTA
AAAGTATAACACTTTCCTTACTAAACCGACTGGGTTTCCAGGTAGGGGCAGGATTCAGGATGACTGACAGGGCCCTT
AGGGAACACTGAGACCCTACGCTGACCTCATAAATGCTTGCTACCTTTGCTGTTTTAATTACATCTTTTAATAGCAG
GAAGCAGAACTCTGCACTTCAAAAGTTTTTCCTCACCTGAGGAGTTAATTTAGTACAAGGGGAAAAAGTACAGGGGG
ATGGGAGAAAGGCGATCACGTTGGGAAGCTATAGAGAAAGAAGAGTAAATTTTAGTAAAGGAGGTTTAAACAAACAA
AATATAAAGAGAAATAGGAACTTGAATCAAGGAAATGATTTTAAAACGCAGTATTCTTAGTGGACTAGAGGAAAAAA
ATAATCTGAGCCAAGTAGAAGACCTTTTCCCCTCCTACCCCTACTTTCTAAGTCACAGAGGCTTTTTGTTCCCCCAG
ACACTCTTGCAGATTAGTCCAGGCAGAAACAGTTAGATGTCCCCAGTTAACCTCCTATTTGACACCACTGATTACCC
CATTGATAGTCACACTTTGGGTTGTAAGTGACTTTTTATTTATTTGTATTTTTGACTGCATTAAGAGGTCTCTAGTT
TTTTATCTCTTGTTTCCCAAAACCTAATAAGTAACTAATGCACAGAGCACATTGATTTGTATTTATTCTATTTTTAG
ACATAATTTATTAGCATGCATGAGCAAATTAAGAAAAACAACAACAAATGAATGCATATATATGTATATGTATGTGT
GTATATATACACATATATATATATATTTTTTTTCTTTTCTTACCAGAAGGTTTTAATCCAAATAAGGAGAAGATATG
CTTAGAACTGAGGTAGAGTTTTCATCCATTCTGTCCTGTAAGTATTTTGCATATTCTGGAGACGCAGGAAGAGATCC
ATCTACATATCCCAAAGCTGAATTATGGTAGACAAAGCTCTTCCACTTTTAGTGCATCAATTTCTTATTTGTGTAAT
AAGAAAATTGGGAAAACGATCTTCAATATGCTTACCAAGCTGTGATTCCAAATATTACGTAAATACACTTGCAAAGG
AGGATGTTTTTAGTAGCAATTTGTACTGATGGTATGGGGCCAAGAGATATATCTTAGAGGGAGGGCTGAGGGTTTGA
AGTCCAACTCCTAAGCCAGTGCCAGAAGAGCCAAGGACAGGTACGGCTGTCATCACTTAGACCTCACCCTGTGGAGC
CACACCCTAGGGTTGGCCAATCTACTCCCAGGAGCAGGGAGGGCAGGAGCCAGGGCTGGGCATAAAAGTCAGGGCAG
AGCCATCTATTGCTTACATTTGCTTCTGACACAACTGTGTTCACTAGCAACCTCAAACAGACACCATGGTGCACCTG
ACTCCTGAGGAGAAGTCTGCCGTTACTGCCCTGTGGGGCAAGGTGAACGTGGATGAAGTTGGTGGTGAGGCCCTGGG
CAGGTTGGTATCAAGGTTACAAGACAGGTTTAAGGAGACCAATAGAAACTGGGCATGTGGAGACAGAGAAGACTCTT
GGGTTTCTGATAGGCACTGACTCTCTCTGCCTATTGGTCTATTTTCCCACCCTTAGGCTGCTGGTGGTCTACCCTTG
GACCCAGAGGTTCTTTGAGTCCTTTGGGGATCTGTCCACTCCTGATGCTGTTATGGGCAACCCTAAGGTGAAGGCTC
ATGGCAAGAAAGTGCTCGGTGCCTTTAGTGATGGCCTGGCTCACCTGGACAACCTCAAGGGCACCTTTGCCACACTG
AGTGAGCTGCACTGTGACAAGCTGCACGTGGATCCTGAGAACTTCAGGGTGAGTCTATGGGACCCTTGATGTTTTCT
TTCCCCTTCTTTTCTATGGTTAAGTTCATGTCATAGGAAGGGGAGAAGTAACAGGGTACAGTTTAGAATGGGAAACA
GACGAATGATTGCATCAGTGTGGAAGTCTCAGGATCGTTTTAGTTTCTTTTATTTGCTGTTCATAACAATTGTTTTC
TTTTGTTTAATTCTTGCTTTCTTTTTTTTTCTTCTCCGCAATTTTTACTATTATACTTAATGCCTTAACATTGTGTA
TAACAAAAGGAAATATCTCTGAGATACATTAAGTAACTTAAAAAAAAACTTTACACAGTCTGCCTAGTACATTACTA
TTTGGAATATATGTGTGCTTATTTGCATATTCATAATCTCCCTACTTTATTTTCTTTTATTTTTAATTGATACATAA
TCATTATACATATTTATGGGTTAAAGTGTAATGTTTTAATATGTGTACACATATTGACCAAATCAGGGTAATTTTGC
ATTTGTAATTTTAAAAAATGCTTTCTTCTTTTAATATACTTTTTTGTTTATCTTATTTCTAATACTTTCCCTAATCT
CTTTCTTTCAGGGCAATAATGATACAATGTATCATGCCTCTTTGCACCATTCTAAAGAATAACAGTGATAATTTCTG
GGTTAAGGCAATAGCAATATTTCTGCATATAAATATTTCTGCATATAAATTGTAACTGATGTAAGAGGTTTCATATT
GCTAATAGCAGCTACAATCCAGCTACCATTCTGCTTTTATTTTATGGTTGGGATAAGGCTGGATTATTCTGAGTCCA
AGCTAGGCCCTTTTGCTAATCATGTTCATACCTCTTATCTTCCTCCCACAGCTCCTGGGCAACGTGCTGGTCTGTGT
GCTGGCCCATCACTTTGGCAAAGAATTCACCCCACCAGTGCAGGCTGCCTATCAGAAAGTGGTGGCTGGTGTGGCTA
ATGCCCTGGCCCACAAGTATCACTAAGCTCGCTTTCTTGCTGTCCAATTTCTATTAAAGGTTCCTTTGTTCCCTAAG
TCCAACTACTAAACTGGGGGATATTATGAAGGGCCTTGAGCATCTGGATTCTGCCTAATAAAAAACATTTATTTTCA
TTGCAATGATGTATTTAAATTATTTCTGAATATTTTACTAAAAAGGGAATGTGGGAGGTCAGTGCATTTAAAACATA
AAGAAATGAAGAGCTAGTTCAAACCTTGGGAAAATACACTATATCTTAAACTCCATGAAAGAAGGTGAGGCTGCAAA
CAGCTAATGCACATTGGCAACAGCCCTGATGCCTATGCCTTATTCATCCCTCAGAAAAGGATTCAAGTAGAGGCTTG
ATTTGGAGGTTAAAGTTTTGCTATGCTGTATTTTACATTACTTATTGTTTTAGCTGTCCTCATGAATGTCTTTTCAC
TACCCATTTGCTTATCCTGCATCTCTCAGCCTTGACTCCACTCAGTTCTCTTGCTTAGAGATACCACCTTTCCCCTG
AAGTGTTCCTTCCATGTTTTACGGCGAGATGGTTTCTCCTCGCCTGGCCACTCAGCCTTAGTTGTCTCTGTTGTCTT
ATAGAGGTCTACTTGAAGAAGGAAAAACAGGGGGCATGGTTTGACTGTCCTGTGAGCCCTTCTTCCCTGCCTCCCCC
ACTCACAGTGACCCGGAATCTGCAGTGCTAGTCTCCCGGAACTATCACTCTTTCACAGTCTGCTTTGGAAGGACTGG
GCTTAGTATGAAAAGTTAGGACTGAGAAGAATTTGAAAGGGGGCTTTTTGTAGCTTGATATTCACTACTGTCTTATT
ACCCTATCATAGGCCCACCCCAAATGGAAGTCCCATTCTTCCTCAGGATGTTTAAGATTAGCATTCAGGAAGAGATC
AGAGGTCTGCTGGCTCCCTTATCATGTCCCTTATGGTGCTTCTGGCTCTGCAGTTATTAGCATAGTGTTACCATCAA
CCACCTTAACTTCATTTTTCTTATTCAATACCTAGGTAGGTAGATGCTAGATTCTGGAAATAAAATATGAGTCTCAA
GTGGTCCTTGTCCTCTCTCCCAGTCAAATTCTGAATCTAGTTGGCAAGATTCTGAAATCAAGGCATATAATCAGTAA
TAAGTGATGATAGAAGGGTATATAGAAGAATTTTATTATATGAGAGGGTGAAACCTAAAATGAAATGAAATCAGACC
CTTGTCTTACACCATAAACAAAAATAAATTTGAATGGGTTAAAGAATTAAACTAAGACCTAAAACCATAAAAATTTT
TAAAGAAATCAAAAGAAGAAAATTCTAATATTCATGTTGCAGCCGTTTTTTGAATTTGATATGAGAAGCAAAGGCAA
CAAAAGGAAAAATAAAGAAGTGAGGCTACATCAAACTAAAAAATTTCCACACAAAAAAGAAAACAATGAACAAATGA
AAGGTGAACCATGAAATGGCATATTTGCAAACCAAATATTTCTTAAATATTTTGGTTAATATCCAAAATATATAAGA
AACACAGATGATTCAATAACAAACAAAAAATTAAAAATAGGAAAATAAAAAAATTAAAAAGAAGAAAATCCTGCCAT
TTATGCGAGAATTGATGAACCTGGAGGATGTAAAACTAAGAAAAATAAGCCTGACACAAAAAGACAAATACTACACA
ACCTTGCTCATATGTGAAACATAAAAAAGTCACTCTCATGGAAACAGACAGTAGAGGTATGGTTTCCAGGGGTTGGG
GGTGGGAGAATCAGGAAACTATTACTCAAAGGGTATAAAATTTCAGTTATGTGGGATGAATAAATTCTAGATATCTA
ATGTACAGCATCGTGACTGTAGTTAATTGTACTGTAAGTATATTTAAAATTTGCAAAGAGAGTAGATTTTTTTGTTT
TTTTAGATGGAGTTTTGCTCTTGTTGTCCAGGCTGGAGTGCAATGGCAAGATCTTGGCTCACTGCAACCTCCGCCTC
CTGGGTTCAAGCAAATCTCCTGCCTCAGCCTCCCGAGTAGCTGGGATTACAGGCATGCGACACCATGCCCAGCTAAT
TTTGTATTTTTAGTAGAGACGGGGTTTCTCCATGTTGGTCAGGCTGATCCGCCTCCTCGGCCACCAAAGGGCTGGGA
TTACAGGCGTGACCACCGGGCCTGGCCGAGAGTAGATCTTAAAAGCATTTACCACAAGAAAAAGGTAACTATGTGAG
ATAATGGGTATGTTAATTAGCTTGATTGTGGTAATCATTTCACAAGGTATACATATATTAAAACATCATGTTGTACA
CCTTAAATATATACAATTTTTATTTGTGAATGATACCTCAATAAAGTTGAAGAATAATAAAAAAGAATAGACATCAC
ATGAATTAAAAAACTAAAAAATAAAAAAATGCATCTTGATGATTAGAATTGCATTCTTGATTTTTCAGATACAAATA
TCCATTTGACTGTTTACTCTTTTCCAAAACAATACAATAAATTTTAGCACTTTATCTTCATTTTCCCCTTCCCAATC
TATAATTTTATATATATATATTTTAGATATTTTGTATAGTTTTACTCCCTAGATTTTCTAGTGTTATTATTAAATAG
TGAAGAAATGTTTACACTTATGTACAAAATGTTTTGCATGCTTTTCTTCATTTCTAACATTCTCTCTAAGTTTATTC
TATTTTTTCCTGATTATCCTTAATATTATCTCTTTCTGCTGGAAATATATTGTTACTTTTGGTTTATCTAAAAATGG
CTTCATTTTCTTCATTCTAAAATCATGTTAAATTAATACCACTCATGTGTAAGTAAGATAGTGGAATAAATAGAAAT
CCAAAAACTAAATCTCACAAAATATAATAATGTGATATATAAAAATATAGCTTTTAAATTTAGCTTGGAAATAAAAA
ACAAACAGTAATTGAACAACTATACTTTTTGAAAAGAGTAAAGTGAAATGCTTAACTGCATATACCACAATCGATTA
CACAATTAGGTGTGAAGGTAAAATTCAGTCACGAAAAAACTAGAATAAAAATATGGGAAGACATGTATATAATCTTA
GAGATAACAGTGTTATTTAATTATCAACCCAAAGTAGAAACTATCAAGGGAGAAATAAATTCAGTCAACAATAAAAG
CATTTAAGAAGTTATTCTAGGCTGGGAGCGGTGGCTCACACCTGCAATTGCAGCACTTTGGGAGGCCTAGACAGGCG
GATCACGACGTCAGGAGTTCAAGATCAGCCTGGCCAACATAGTGAAACCTCATCGCTACTAAAAATATAAAAACTTA
GCCTGGCGTGGTGGCAGGCATGTGTAATCCCAGCAATTTGGGAGGCTGAGGCAGGAGAATCGCTTGATCCTGGGAGG
CAGAGGTTGCAGTGAGCCAAGATTGTGCCACTGCATTCCAGCCCAGGTGACAGCATGAGACTCCGTCACAAAAAAAA
AAGAAAAAAAAGGGGGGGGGGGGCGGTGGAGCCAAGATGACCGAATAGGAACAGCTCCAGTCTATAGCTCCCATCGT
GAGTGACGCAGAAGACGGGTGATTTCTGCATTTCCAACTGAGGTACCAGGTTCATCTCACAGGGAAGTGCCAGGCAG
TGGGTGCAGGACAGTAGTGCAGTGCACTGTGCATGAGCCGAAGCAGGGCGAGGCATCACCTCACCCGGGAAGCACAA
GGGGTCAGGGAATTCCCTTTCCTAGTCAAAGAAAAGGGTGACAGATGGCACCTGGAAAATCGGGTCACTCCCGCCCT
AATACTGCGCTCTTCCAACAAGCTTAACAAATGGCACACCAGGAGATTATATCCCATGCCTGGCTCAGAGGGTCCTA
CGCCCATGGAGCCTCGCTCATTGCTAGCACAGCAGTCTGAGGTCAAACTGCAAGGTGGCAGTGAGGCTGGGGGAGGG
GTGCCCACCATTGTCCAGGCTTGAGCAGGTAAACAAAGCCGCCTGGAAGCTCGAACTGGGTGGAGCCCACCACAGCT
CAAGGAGGCCTGCCTGCCTCTGTAGGCTCCACCTCTAGGGGCAGGGCACAGACAAACAAAAGACAACAAGAACCTCT
GCAGACTTAAATGTCCCTGTCTGACAGCTTTGAAGAGAGTAGTGGTTCTCCCAGCACATAGCTTCAGATCTGAGAAC
AGGCAGACTGCCTCCTCAAGTGGGTCCCTGACCCCCGAGTAGCCTAACTGGGAGGCATCCCCCAGTAGGGCGGACTG
ACACCTCACATGGCTGGTACTCCTCTAAGACAAAACTTCCAGAGGAATGATCAGGCAGCAGCATTTGCGGTTCACCA
ATATCCACTGTTCTGCAGCCACCGCTGCTGATACCCAGGAAAACAGCATCTGGAGTGGACCTCCAGTAAACTCCAAC
AGACCTGCAGCTGAGGGTCCTGACTGTTAGAAGGAAAACTAACAAACAGAAAGGACATCCACACCAAAAACCCATCT
GTACATCACCATCATCAAAGACCAAAGGTAGATAAAACCATAAAGATGGGGAAAAAGCAGAGCAGAAAAACTGGACA
CTCTAAAAATGAGAGTGCCTCTCCTTCTCCAAAGTAACGCAGCTCCTCACCAGCAATGGAACAAAGCTGGGCAGAGA
ATGACTTTGACGAGTTGAGAGAGGAAGGCTTCAGAAGATCAAACTACTCCAAGCTAAAGGAGGAAGTTCGAACAAAC
GGCAAAGAAGTAAAAAACTTTGAAAAAAAATTAGATGAATGGATAACTAGAATAACCAATGCACAGAAGTCCTTAAA
GGACCTGATGGAGCTGAAAACCAAGGCAGGAGAACTACGTGACAAATACACAAGCCTCAGTAACCGATGAGATCAAC
TGGAAGAAAGGGTATCAATGACGGAAGATGAAATGAATGAAATGAAGCATGAAGAGAAGTTTAGAGAAAAAAGAATA
AAAAGAAACGAACAAAGCCTCCAAGAAATATGGGACTATGTGAAAAGACCAAATCTACATCTAATTGGTGTAGCTGA
AAGTGATGGGGAGAATGGAACCAAGTTGGAAAACACTCTGCAGGATATTATCCAGGAGAACTTCCCCAATCTAGCAA
GGCAGCCCAAATTCACATTCAGGAAATACAGAGAACGCCACAAAGATACTCCTAGAGAAAAGCAACTCCAAGACACA
TAACTGACAGATTCACCAAAGTTGAAATGAAGGAAAAAATGTTAAGGGCAGCCAGAGAGAAAGGTCGGGTTACCCAC
AAAGGGAAGCCCATCAGACTAACAGCTGATCTATCGGCAGAAACTCTACAAGCCAGAAGAAAGTGGGGGCCAATATT
CAACATTGTTAAAGAAAAGAATTTTCGGCCCAGAATTTCATATCCAGCCAAACTAAGCTTCATAAGCATTGGAGAAA
TAAAATCCTTTACAGACAAGCAAATGCTGAGAGATTTTGTCACCACCAGGCCTGCCCTACAAGAGCTCCTGAAGGAA
GCACTAAACATGGAAAGGAACAACTAGTATCAGCCACTGCAAAAACATGCCAAATTGTAAACGACCATCAAGGCTAG
GAAGAAACTGCATCAAGGAGCAAAATAACCAGCTAACATCATAATGACAGGATCAAATTCATACATAACAATACTCA
CCTTAAATGTAAATAGGCTAAATGCTCCAATTAAAAGACACAGACTGGCAAATTGGATAAGGAGTCAAGACCCATCT
GTCGTTATGTATTCAGGAAACCCATCTCACGTGCAGAGACACACATAGGCTCGAAATAAAAGGATGGAGGAATATCT
ACCAAGCAAATGGAAAACAAAAAAAGGCAGGGGTTGCAATCCTAGTCTCTGATAAAACAGATTTTAAACCAACAAAG
ATCAAAAGAGACAAAGAAGGCCATTACATAATGGCAAAGGGATCTATTCAAGAAGAAGAACTAACTATACTAAATAT
ATATGCACCCAATACAGGAGCACCCAGATTCATAAAACAAGTCCTGAGTGACCTACAAAGAGACTTAGATGCCCACA
CAATAATAATGGGAGACTTTAACACCCCACTGTCAACATTAGACAGATCAACGAGACAGAAAGTTAACAAGGATATC
CAGGAATTGGACTCAGCTCTGCACCAAGCAGACCTAATAGACATCTACAGAACTCTCCACCCCAAATCAACAGAATA
TACATTCTTTTCAGCACCACACCACACCTATTCCAAAACTGACCACATAGTTGGAAGTAAAGCTCTCCTCAGCAAAT
GTAAAAGAACAGAAACTATAACAAACTGTCTCTCAGACCACAGTGCAATCAAACTAGAACTCAGGATTAAGAAACTC
ACTCAAAACCACTCAGCTACATGGAAACTGAACAGCCTGCTCCTGAATGACTACTGGGTACATAACAAAATGAAGGC
AGAAATAAAGATGTTCTTTGAAACAACGAGAACAAAGACACAACACACCAGAATCTCTGAGACACATTCAAAGCAGT
GTGTAGAGGGAAATTTATAGCACTAAATGCCCACAAGGGAAAGCAGGAAAGATCTAAAATTGACACCCTAACATCAC
AATTAAAAAACTAGAGAAGCAGGAGCAAACACATTCAAAAGCTAACAGAAGACAAGAAATAACTAAGATCAGAGCAG
AAGTGAAGAAGATAGAGACACAAAAAACCCTTCAAAAAAATCAATGAATCCAGAAGCTGTTTTTTTGAAAAGATCAA
CAAAATTGATAGACTGCTAGCAAGACTAATAAAGAAGAAAGGGGAGAAGAATCAAATAGACGCAATAAAAAATGACA
CGGGGTATCACCACTGATCCCACAGAAATACAAACTACCGTCAGAGAATACTATAAACACCTCTACGCAAATAAACT
AGAAAATCTAGAAGAAATGGATAAATTCCTCGACACATACACTCTGCCAAGACTAAACCAGGAAGAAGTTGTATCTC
TGAATAGACCAATAACAGGCTCTGAAATTGAGGCAATAATTAATAGCTTATCAACCAAAAAAAGTCCGGGACCAGTA
GGATTCATAGCCGAATTCTACCAGAGGTACAAGGAGGAGCTGGTACCATTCCTTCTGAAACTATTCCAATCAATAGA
AAAAGAGGGAATCCTCCCTAACTCATTTTATGAGGCCAGCATCATCCTGATACCAAAGCCTGACAGAGACACAACAA
AAAAAGAGAATGTTACACCAATATCCTTGATGAACATCGATGCAAAAATCCTCAATAAAATACTGGCAAACTGAATC
CAGCAGCACATCAAAAAGCTTATCCTCCATGATCAAGTGGGCTTCATCCCTGCCATGCAAGGCTGGTTCAACATACG
AAATCAATAAACATAATCCAGCATATAAACAGAACCAAAGACACAAACCATATGATTATCTCAATAGATGCAGAAAA
GGCCTTTGACAAAATTCAACAATGCTTCATGCTAAAAACTCTCAATAAATTAGGTATTGATGGGACATATCTCAAAA
TAATAAGAGCTATCTATGACAAACCCACAGCCAATATCATACTGAGTGGACAAAAACTGGAAGCATTCCCTTTGAAA
ACTGGCACAAGGCAGGGATGCCCTCTCTCACCACTCCTATTCAACATAGTGTTGGAAGTTCTGGCCAGGGCAATCAG
GCAGGAGAAGGAAATAAAGGGCATTCAATTAGGAAAAGAGGAAGGTGAAATTGTCCCTGTTTGCAGATGACATGATT
GTATATCTAGAAAACCCCATTGTCTCAGCCCAAAATCTCCTTAAGCTGATAAGCAACTTCAGCAAAGTCTCAGGATA
TAAAATCAGTGTGCAAAAATCACAAGTATTCCTATGCACCAATAACAGACAAACAGAGAGCCAAATCATGAGTGAAC
TCCCATTCACAATTGCTTCAAAGAGAATAAAATACCTAGGAATCCAACTTACAAGGGATGTGAAGGACCTCTTCAAG
GAGAACTACAAACCACTGCTCAATGAAATAAAAGAGGATACAAACAAATGGAAGAACATTCCATGCTTATGGGTAGG
AAGAATCATATCGTGAAAATGGTCATACTGCCCAAGGTAATTTATAGATTCAATGCCATCCCCATCAAGCTACCAAT
GACTTTCTTCACAGAACTGGAAAAAACTACTTTAAAGTTCATATGGAATCAAAAAAGAGCCCACATCACCAAGGCAA
TCCTAAGCCAAAAGAACAAAGCTGGAGGCATCACGCTACCTGACTTCAAACTATACTACAATGCTACGGTAACCAAA
ACAGCATGGTACTGGTACCAAAACAGAGATCTAGACCAATGGAACAGAACAGAGCCCTCAGAAATAATGCCGCATAT
CTACAACTATCCGATCTTTGACAAACCTGAGAGAAACAAGCAATGGGGAAAGGATTCCCTATTTAATAAATGGTGCT
GGGAAAACTGGCTAGCCATATGTAGAAAGCTGAAACTGGATCCTTCCTTACACCTTATACAAAAATTAATTCAAGAT
GGATTAAAGACTTAAACATTAGACCTAAAACCATAAAAACCCTAGAAAAAAACCTAGGCAATACCATTCAGGACATA
GGCATGGGCAAGGACTTCATGTCTAAAACACCAAAACGAATGGCAACAAAAGACAAAATGGACAAACGGGATCTAAT
TAAACTAAAGAGCTTCTGCACAGCTAAAGAAACTACCATCAGAGTGAACAGGCAACCTACAAAATGGGAGAAAATTT
TTGCAATCTACTCATCTGACAAAGGGCTAATATCCAGAATCTACAATGAACTCAAACAAATTTACAAGAAAAAACAA
ACAACCCCATCAAAAAGTGGGCAAAGGATATGAACAGACACTTCTCAAAAGAAGACATTTATGTAATCAAAAAACAC
ATGAAAAAATGCTCATCATCACTAGCCATCAGAGAAATGCAAATCAAAACCACAATGAGATACCATCTCACACCAGT
TAGAATGGCGATCATTAAAAAGTCAGGAAACAACAGGTGCTGGAGAGGATGTGGAGAAACAGGAACAACTTTTACAC
TGTTGGTGGGACTGTAAACTAGTTCAACCATTGCGGAAGTCAGTGTGGCAATTCCTCAGGAATCTAGAACTAGAAAT
ACCATTTGACCCAGCCATCCCATTACTGGGTAGATACCCAAAGGATTATAAATCATGCTGCTATAAAGACACATGCA
CACGTATGTTTATTGCAGCACTATTCACAATAGCAAAGACTTGGAACCAACCCAAATGTCCAACAACGATAGATTGG
ATTAAGAAAATGTGGCACATATACACCATGGAATACTATGCAGCCATAAAAAATGATGAGTTCATGTCCTTTGTAGG
GACATGGATGAAGCTGGAAACTATCATTCTCAGCAAACTATCACAAGGACAATAAACCAAACACCGCATGTTCTCAC
TCATAGGTGGGAATTGAACAATGAGAACACATGGACACATGAAGAGGAACATCACACTCTGGGGACTGTTATGGGGT
GGGGGGCAGGGGCAGGGATAGCACTAGGAGATATACCTAATGCTAAATGACGAGTTAATGGGTGCAGCACACCAACA
TGGCACATGTATACATATATAACAAACCTGCCGTTGTGCACATGTACCCTAAAACTTGAAGTATAATAATAAAAAAA
AGTTATCCTATTAAAACTGATCTCACACATCCGTAGAGCCATTATCAAGTCTTTCTCTTTGAAACAGACAGAAATTT
AGTGTTTTCTCAGTCAGTTAAC

GenBank Accession No. U01317.1 (SEQ ID NO: 249)

GAATTCTAATCTCCCTCTCAACCCTACAGTCACCCATTTGGTATATTAAAGATGTGTTGTCTACTGTCTAGTATCCC
TCAAGTAGTGTCAGGAATTAGTCATTTAAATAGTCTGCAAGCCAGGAGTGGTGGCTCATGTCTGTAATTCCAGCACT
GGAGAGGTAGAAGTGGGAGGACTGCTTGAGCTCAAGAGTTTGATATTATCCTGGACAACATAGCAAGACCTCGTCTC
TACTTAAAAAAAAAAAAATTAGCCAGGCATGTGATGTACACCTGTAGTCCCAGCTACTCAGGAGGCCGAAATGGGAG
GATCCCTTGAGCTCAGGAGGTCAAGGCTGCAGTGAGACATGATCTTGCCACTGCACTCCAGCCTGGACAGCAGAGTG
AAACCTTGCCTCACGAAACAGAATACAAAAACAAACAAACAAAAAACTGCTCCGCAATGCGCTTCCTTGATGCTCTA
CCACATAGGTCTGGGTACTTTGTACACATTATCTCATTGCTGTTCGTAATTGTTAGATTAATTTTGTAATATTGATA
TTATTCCTAGAAAGCTGAGGCCTCAAGATGATAACTTTTATTTTCTGGACTTGTAATAGCTTTCTCTTGTATTCACC
ATGTTGTAACTTTCTTAGAGTAGTAACAATATAAAGTTATTGTGAGTTTTTGCAAACACAGCAAACACAACGACCCA
TATAGACATTGATGTGAAATTGTCTATTGTCAATTTATGGGAAAACAAGTATGTACTTTTTCTACTAAGCCATTGAA
ACAGGAATAACAGAACAAGATTGAAAGAATACATTTTCCGAAATTACTTGAGTATTATACAAAGACAAGCACGTGGA
CCTGGGAGGAGGGTTATTGTCCATGACTGGTGTGTGGAGACAAATGCAGGTTTATAATAGATGGGATGGCATCTAGC
GCAATGACTTTGCCATCACTTTTAGAGAGCTCTTGGGGACCCCAGTACACAAGAGGGGACGCAGGGTATATGTAGAC
ATCTCATTCTTTTTCTTAGTGTGAGAATAAGAATAGCCATGACCTGAGTTTATAGACAATGAGCCCTTTTCTCTCTC
CCACTCAGCAGCTATGAGATGGCTTGCCCTGCCTCTCTACTAGGCTGACTCACTCCAAGGCCCAGCAATGGGCAGGG
CTCTGTCAGGGCTTTGATAGCACTATCTGCAGAGCCAGGGCCGAGAAGGGGTGGACTCCAGAGACTCTCCCTCCCAT
TCCCGAGCAGGGTTTGCTTATTTATGCATTTAAATGATATATTTATTTTAAAAGAAATAACAGGAGACTGCCCAGCC
CTGGCTGTGACATGGAAACTATGTAGAATATTTTGGGTTCCATTTTTTTTTCCTTCTTTCAGTTAGAGGAAAAGGGG
CTCACTGCACATACACTAGACAGAAAGTCAGGAGCTTTGAATCCAAGCCTGATCATTTCCATGTCATACTGAGAAAG
TCCCCACCCTTCTCTGAGCCTCAGTTTCTCTTTTTATAAGTAGGAGTCTGGAGTAAATGATTTCCAATGGCTCTCAT
TTCAATACAAAATTTCCGTTTATTAAATGCATGAGCTTCTGTTACTCCAAGACTGAGAAGGAAATTGAACCTGAGAC
TCATTGACTGGCAAGATGTCCCCAGAGGCTCTCATTCAGCAATAAAATTCTCACCTTCACCCAGGCCCACTGAGTGT
CAGATTTGCATGCACTAGTTCACGTGTGTAAAAAGGAGGATGCTTCTTTCCTTTGTATTCTCACATACCTTTAGGAA
AGAACTTAGCACCCTTCCCACACAGCCATCCCAATAACTCATTTCAGTGACTCAACCCTTGACTTTATAAAAGTCTT
GGGCAGTATAGAGCAGAGATTAAGAGTACAGATGCTGGAGCCAGACCACCTGAGTGATTAGTGACTCAGTTTCTCTT
AGTAATTGTATGACTCAGTTTCTTCATCTGTAAAATGGAGGGTTTTTTAATTAGTTTGTTTTTGAGAAAGGGTCTCA
CTCTGTCACCCAAATGGGAGTGTAGTGGCAAAATCTCGGCTCACTGCAACTTGCACTTCCCAGGCTCAAGCGGTCCT
CCCACCTCAACATCCTGAGTAGCTGGAACCACAGGTACACACCACCATACCTCGCTAATTTTTTGTATTTTTGGTAG
AGATGGGGTTTCACATGTTACACAGGATGGTCTCAGACTCCGGAGCTCAAGCAATCTGCCCACCTCAGCCTTCCAAA
GTGCTGGGATTATAAGCATGATTACAGGAGTTTTAACAGGCTCATAAGATTGTTCTGCAGCCCGAGTGAGTTAATAC
ATGCAAAGAGTTTAAAGCAGTGACTTATAAATGCTAACTACTCTAGAAATGTTTGCTAGTATTTTTTGTTTAACTGC
AATCATTCTTGCTGCAGGTGAAAACTAGTGTTCTGTACTTTATGCCCATTCATCTTTAACTGTAATAATAAAAATAA
CTGACATTTATTGAAGGCTATCAGAGACTGTAATTAGTGCTTTGCATAATTAATCATATTTAATACTCTTGGATTCT
TTCAGGTAGATACTATTATTATCCCCATTTTACTACAGTTAAAAAAACTACCTCTCAACTTGCTCAAGCATACACTC
TCACACACACAAACATAAACTACTAGCAAATAGTAGAATTGAGATTTGGTCCTAATTATGTCTTTGCTCACTATCCA
ATAAATATTTATTGACATGTACTTCTTGGCAGTCTGTATGCTGGATGCTGGGGATACAAAGATGTTTAAATTTAAGC
TCCAGTCTCTGCTTCCAAAGGCCTCCCAGGCCAAGTTATCCATTCAGAAAGCATTTTTTACTCTTTGCATTCCACTG
TTTTTCCTAAGTGACTAAAAAATTACACTTTATTCGTCTGTGTCCTGCTCTGGGATGATAGTCTGACTTTCCTAACC
TGAGCCTAACATCCCTGACATCAGGAAAGACTACACCATGTGGAGAAGGGGTGGTGGTTTTGATTGCTGCTGTCTTC
AGTTAGATGGTTAACTTTGTGAAGTTGAAAACTGTGGCTCTCTGGTTGACTGTTAGAGTTCTGGCACTTGTCACTAT
GCCTATTATTTAACAAATGCATGAATGCTTCAGAATATGGGAATATTATCTTCTGGAATAGGGAATCAAGTTATATT
ATGTAACCCAGGATTAGAAGATTCTTCTGTGTGTAAGAATTTCATAAACATTAAGCTGTCTAGCAAAAGCAAGGGCT
TGGAAAATCTGTGAGCTCCTCACCATATAGAAAGCTTTTAACCCATCATTGAATAAATCCCTATAGGGGATTTCTAC
CCTGAGCAAAAGGCTGGTCTTGATTAATTCCCAAACTCATATAGCTCTGAGAAAGTCTATGCTGTTAACGTTTTCTT
GTCTGCTACCCCATCATATGCACAACAATAAATGCAGGCCTAGGCATGACTGAAGGCTCTCTCATAATTCTTGGTTG
CATGAATCAGATTATCAACAGAAATGTTGAGACAAACTATGGGGAAGCAGGGTATGAAAGAGCTCTGAATGAAATGG
AAACCGCAATGCTTCCTGCCCATTCAGGGCTCCAGCATGTAGAAATCTGGGGCTTTGTGAAGACTGGCTTAAAATCA
GAAGCCCCATTGGATAAGAGTAGGGAAGAACCTAGAGCCTACGCTGAGCAGGTTTCCTTCATGTGACAGGGAGCCTC
CTGCCCCGAACTTCCAGGGATCCTCTCTTAAGTGTTTCCTGCTGGAATCTCCTCACTTCTATCTGGAAATGGTTTCT
CCACAGTCCAGCCCCTGGCTAGTTGAAAGAGTTACCCATGCAGAGGCCCTCCTAGCATCCAGAGACTAGTGCTTAGA
TTCCTACTTTCAGCGTTGGACAACCTGGATCCACTTGCCCAGTGTTCTTCCTTAGTTCCTACCTTCGACCTTGATCC
TCCTTTATCTTCCTGAACCCTGCTGAGATGATCTATGTGGGGAGAATGGCTTCTTTGAGAAACATCTTCTTCGTTAG
TGGCCTGCCCCTCATTCCCACTTTAATATCCAGAATCACTATAAGAAGAATATAATAAGAGGAATAACTCTTATTAT
AGGTAAGGGAAAATTAAGAGGCATACGTGATGGGATGAGTAAGAGAGGAGAGGGAAGGATTAATGGATGATAAAATC
TACTACTATTTGTTGAGACCTTTTATAGTCTAATCAATTTTGCTATTGTTTTCCATCCTCACGCTAACTCCATAAAA
AAACACTATTATTATCTTTATTTTGCCATGACAAGACTGAGCTCAGAAGAGTCAAGCATTTGCCTAAGGTCGGACAT
GTCAGAGGCAGTGCCAGACCTATGTGAGACTCTGCAGCTACTGCTCATGGGCCCTGTGCTGCACTGATGAGGAGGAT
CAGATGGATGGGGCAATGAAGCAAAGGAATCATTCTGTGGATAAAGGAGACAGCCATGAAGAAGTCTATGACTGTAA
ATTTGGGAGCAGGAGTCTCTAAGGACTTGGATTTCAAGGAATTTTGACTCAGCAAACACAAGACCCTCACGGTGACT
TTGCGAGCTGGTGTGCCAGATGTGTCTATCAGAGGTTCCAGGGAGGGTGGGGTGGGGTCAGGGCTGGCCACCAGCTA
TCAGGGCCCAGATGGGTTATAGGCTGGCAGGCTCAGATAGGTGGTTAGGTCAGGTTGGTGGTGCTGGGTGGAGTCCA
TGACTCCCAGGAGCCAGGAGAGATAGACCATGAGTAGAGGGCAGACATGGGAAAGGTGGGGGAGGCACAGCATAGCA
GCATTTTTCATTCTACTACTACATGGGACTGCTCCCCTATACCCCCAGCTAGGGGCAAGTGCCTTGACTCCTATGTT
TTCAGGATCATCATCTATAAAGTAAGAGTAATAATTGTGTCTATCTCATAGGGTTATTATGAGGATCAAAGGAGATG
CACACTCTCTGGACCAGTGGCCTAACAGTTCAGGACAGAGCTATGGGCTTCCTATGTATGGGTCAGTGGTCTCAATG
TAGCAGGCAAGTTCCAGAAGATAGCATCAACCACTGTTAGAGATATACTGCCAGTCTCAGAGCCTGATGTTAATTTA
GCAATGGGCTGGGACCCTCCTCCAGTAGAACCTTCTAACCAGCTGCTGCAGTCAAAGTCGAATGCAGCTGGTTAGAC
TTTTTTTAATGAAAGCTTAGCTTTCATTAAAGATTAAGCTCCTAAGCAGGGCACAGATGAAATTGTCTAACAGCAAC
TTTGCCATCTAAAAAAATCTGACTTCACTGGAAACATGGAAGCCCAAGGTTCTGAACATGAGAAATTTTTAGGAATC
TGCACAGGAGTTGAGAGGGAAACAAGATGGTGAAGGGACTAGAAACCACATGAGAGACACGAGGAAATAGTGTAGAT
TTAGGCTGGAGGTAAATGAAAGAGAAGTGGGAATTAATACTTACTGAAATCTTTCTATATGTCAGGTGCCATTTTAT
GATATTTAATAATCTCATTACATATGGTAATTCTGTGAGATATGTATTATTGAACATACTATAATTAATACTAATGA
TAAGTAACACCTCTTGAGTACTTAGTATATGCTAGAATCAAATTTAAGTTTATCATATGAGGCCGGGCACGGTGGCT
CATATATGGGATTACATGCCTGTAATCCCAGCACTTTGGGAGGCCAAGGCAATTGGATCACCTGAGGTCAGGAGTTC
CAGACCAGCCTGGCCAACATGGTGAAACCCCTTCTCTACTAAAAAATACAAAAAATCAGCCAGGTGTGGTGGCACGC
GTCTATAATCCCAGCTACTCAGGAGGCTGAGGCAGGAGAATCACTTGAACCCAGGAGGTGGAGGTTGCAGTGAGCTA
AGATTGCACCACTGCACTCCAGCCTAGGCGACAGAGTGAGACTCCATCTCAAAAAAAAAAAAAGAAGTTTATTATAT
GAATTAACTTAGTTTTACTCACACCAATACTCAGAAGTAGATTATTACCTCATTTATTGATGAGGAGCCCAATGTAC
TTGTAGTGTAGATCAACTTATTGAAAGCACAAGCTAATAAGTAGACAATTAGTAATTAGAAGTCAGATGGTCTGAGC
TCTCCTACTGTCTACATTACATGAGCTCTTATTAACTGGGGACTCGAAAATCAAAGACATGAAATAATTTGTCCAAG
CTTACAGAACCACCAAGTAGTAAGGCTAGGATGTAGACCCAGTTCTGCTACCTCTGAAGACAGTGTTTTTTCCACAG
CAAAACACAAACTCAGATATTGTGGATGCGAGAAATTAGAAGTAGATATTCCTGCCCTGTGGCCCTTGCTTCTTACT
TTTACTTCTTGGCGATTGGAAGTTGTGGTCCAAGCCACAGTTGCAGACCATACTTCCTCAACCATAATTGCATTTCT
TCAGGAAAGTTTGAGGGAGAAAAAGGTAAAGAAAAATTTAGAAACAACTTCAGAATAAAGAGATTTTCTCTTGGGTT
ACAGAGATTGTCATATGACAAATTATAAGCAGACACTTGAGAAAACTGAAGGCCCATGCCTGCCCAAATTACCCTTT
GACCCCTTGGTCAAGCTGCAACTTTGGTTAAAGGGAGTGTTTATGTGTTATAGTGTTCATTTACTCTTCTGGTCTAA
CCCATTGGCTCCGTCTTCATCCTGCAGTGACCTCAGTGCCTCAGAAACATACATATGTTTGTCTAGTTTAAGTTTGT
GTGAAATTCTAACTAGCGTCAAGAACTGAGGGCCCTAAACTATGCTAGGAATAGTGCTGTGGTGCTGTGATAGGTAC
ACAAGAAATGAGAAGAAACTGCAGATTCTCTGCATCTCCCTTTGCCGGGTCTGACAACAAAGTTTCCCCAAATTTTA
CCAATGCAAGCCATTTCTCCATATGCTAACTACTTTAAAATCATTTGGGGCTTCACATTGTCTTTCTCATCTGTAAA
AAGAATGGAAGAACTCATTCCTACAGAACTCCCTATGTCTTCCCTGATGGGCTAGAGTTCCTCTTTCTCAAAAATTA
GCCATTATTGTATTTCCTTCTAAGCCAAAGCTCAGAGGTCTTGTATTGCCCAGTGACATGCACACTGGTCAAAAGTA
GGCTAAGTAGAAGGGTACTTTCACAGGAACAGAGAGCAAAAGAGGTGGGTGAATGAGAGGGTAAGTGAGAAAAGACA
AATGAGAAGTTACAACATGATGGCTTGTTGTCTAAATATCTCCTAGGGAATTATTGTGAGAGGTCTGAATAGTGTTG
TAAAATAAGCTGAATCTGCTGCCTAACATTAACAGTCAAGAAATACCTCCGAATAACTGTACCTCCAATTATTCTTT
AAGGTAGCATGCAACTGTAATAGTTGCATGTATATATTTATCATAATACTGTAACAGAAAACACTTACTGAATATAT
ACTGTGTCCCTAGTTCTTTACACAATAAACTAATCTCATCCTCATAATTCTATTAGCTAATACATATTATCATCCTA
TATTTCAGAGACTTCAAGAAGTTAAGCAACTTGCTCAAGATCATCTAAGAAGTAGGTGGTATTTCTGGGCTCATTTG
GCCCCTCCTAATCTCTCATGGCAACATGGCTGCCTAAAGTGTTGATTGCCTTAATTCATCAGGGATGGGCTCATACT
CACTGCAGACCTTAACTGGCATCCTCTTTTCTTATGTGATCTGCCTGACCCTAGTAGAACTTATGAAATTTCTGATG
AGAAAGGAGAGAGGAGAAAGGCAGAGCTGACTGTGATGAGTGATGAAGGTGCCTTCTCATCTGGGTACCAGTGGGGC
CTCTAAGACTAAGTCACTCTGTCTCACTGTGTCTTAGCCAGTTCCTTACAGCTTGCCCTGATGGGAGATAGAGAATG
GGTATCCTCCAACAAAAAAATAAATTTTCATTTCTCAAGGTCCAACTTATGTTTTCTTAATTTTTAAAAAAATCTTG
ACCATTCTCCACTCTCTAAAATAATCCACAGTGAGAGAAACATTCTTTTCCCCCATCCCATAAATACCTCTATTAAA
TATGGAAAATCTGGGCATGGTGTCTCACACCTGTAATCCCAGCACTTTGGGAGGCTGAGGTGGGTGGACTGCTTGGA
GCTCAGGAGTTCAAGACCATCTTGGACAACATGGTGATACCCTGCCTCTACAAAAAGTACAAAAATTAGCCTGGCAT
GGTGGTGTGCACCTGTAATCCCAGCTATTAGGGTGGCTGAGGCAGGAGAATTGCTTGAACCCGGGAGGCGGAGGTTG
CAGTGAGCTGAGATCGTGCCACTGCACTCCAGCCTGGGGGACAGAGCACATTATAATTAACTGTTATTTTTTACTTG
GACTCTTGTGGGGAATAAGATACATGTTTTATTCTTATTTATGATTCAAGCACTGAAAATAGTGTTTAGCATCCAGC
AGGTGCTTCAAAACCATTTGCTGAATGATTACTATACTTTTTACAAGCTCAGCTCCCTCTATCCCTTCCAGCATCCT
CATCTCTGATTAAATAAGCTTCAGTTTTTCCTTAGTTCCTGTTACATTTCTGTGTGTCTCCATTAGTGACCTCCCAT
AGTCCAAGCATGAGCAGTTCTGGCCAGGCCCCTGTCGGGGTCAGTGCCCCACCCCCGCCTTCTGGTTCTGTGTAACC
TTCTAAGCAAACCTTCTGGCTCAAGCACAGCAATGCTGAGTCATGATGAGTCATGCTGAGGCTTAGGGTGTGTGCCC
AGATGTTCTCAGCCTAGAGTGATGACTCCTATCTGGGTCCCCAGCAGGATGCTTACAGGGCAGATGGCAAAAAAAAG
GAGAAGCTGACCACCTGACTAAAACTCCACCTCAAACGGCATCATAAAGAAAATGGATGCCTGAGACAGAATGTGAC
ATATTCTAGAATATATTATTTCCTGAATATATATATATATATATATACACATATACGTATATATATATATATATATA
TATTTGTTGTTATCAATTGCCATAGAATGATTAGTTATTGTGAATCAAATATTTATCTTGCAGGTGGCCTCTATACC
TAGAAGCGGCAGAATCAGGCTTTATTAATACATGTGTATAGATTTTTAGGATCTATACACATGTATTAATATGAAAC
AAGGATATGGAAGAGGAAGGCATGAAAACAGGAAAAGAAAACAAACCTTGTTTGCCATTTTAAGGCACCCCTGGACA
GCTAGGTGGCAAAAGGCCTGTGCTGTTAGAGGACACATGCTCACATACGGGGTCAGATCTGACTTGGGGTGCTACTG
GGAAGCTCTCATCTTAAGGATACATCTCAGGCCAGTCTTGGTGCATTAGGAAGATGTAGGCAACTCTGATCCTGAGA
GGAAAGAAACATTCCTCCAGGAGAGCTAAAAGGGTTCACCTGTGTGGGTAACTGTGAAGGACTACAAGAGGATGAAA
AACAATGACAGACAGACATAATGCTTGTGGGAGAAAAAACAGGAGGTCAAGGGGATAGAGAAGGCTTCCAGAAGAAT
GGCTTTGAAGCTGGCTTCTGTAGGAGTTCACAGTGGCAAAGATGTTTCAGAAATGTGACATGACTTAAGGAACTATA
CAAAAAGGAACAAATTTAAGGAGAGGCAGATAAATTAGTTCAACAGACATGCAAGGAATTTTCAGATGAATGTTATG
TCTCCACTGAGCTTCTTGAGGTTAGCAGCTGTGAGGGTTTTGCAGGCCCAGGACCCATTACAGGACCTCACGTATAC
TTGACACTGTTTTTTGTATTCATTTGTGAATGAATGACCTCTTGTCAGTCTACTCGGTTTCGCTGTGAATGAATGAT
GTCTTGTCAGCCTACTTGGTTTCGCTAAGAGCACAGAGAGAAGATTTAGTGATGCTATGTAAAAACTTCCTTTTTGG
TTCAAGTGTATGTTTGTGATAGAAATGAAGACAGGCTACATGATGCATATCTAACATAAACACAAACATTAAGAAAG
GAAATCAACCTGAAGAGTATTTATACAGATAACAAAATACAGAGAGTGAGTTAAATGTGTAATAACTGTGGCACAGG
CTGGAATATGAGCCATTTAAATCACAAATTAATTAGAAAAAAAACAGTGGGGAAAAAATTCCATGGATGGGTCTAGA
AAGACTAGCATTGTTTTAGGTTGAGTGGCAGTGTTTAAAGGGTGATATCAGACTAAACTTGAAATATGTGGCTAAAT
AACTAGAATACTCTTTATTTTTTCGTATCATGAATAGCAGATATAGCTTGATGGCCCCATGCTTGGTTTAACATCCT
TGCTGTTCCTGACATGAAATCCTTAATTTTTGACAAAGGGGCTATTCATTTTCATTTTATATTGGGCCTAGAAATTA
TGTAGATGGTCCTGAGGAAAAGTTTATAGCTTGTCTATTTCTCTCTCTAACATAGTTGTCAGCACAATGCCTAGGCT
ATAGGAAGTACTCAAAGCTTGTTAAATTGAATTCTATCCTTCTTATTCAATTCTACACATGGAGGAAAAACTCATCA
GGGATGGAGGCACGCCTCTAAGGAAGGCAGGTGTGGCTCTGCAGTGTGATTGGGTACTTGCAGGACGAAGGGTGGGG
TGGGAGTGGCTAACCTTCCATTCCTAGTGCAGAGGTCACAGCCTAAACATCAAATTCCTTGAGGTGCGGTGGCTCAC
TCCTGTAATCACAGCAGTTTGGGACGCCAAGGTGGGCAGATCACTTGAGGTCAGGAGTTGGACACCAGCCCAGCCAA
CATAGTGAAACCTGGTCTCTGCTTAAAAATATAAAAATTAGCTGGACGTGGTGACGGGAGCCTGTAATCCAACTACT
TGGGAGGCTGAGGCAGGAGAATCGCTTGAACCGGGGAGGTGGAGTTTGCACTGAGCAGAGATCATGCCATTGCACTC
CAGCCTCCAGAGCGAGACTCTGTCTAAAGAAAAACGAAAACAAACAAACAAACAAACAAACAAAACCCATCAAATTC
CCTGACCGAACAGAATTCTGTCTGATTGTTCTCTGACTTATCTACCATTTTCCCTCCTTAAAGAAACTGTGGAACTT
CCTTCAGCTAGAGGGGCCTGGCTCAGAAGCCTCTGGTCAGCATCCAAGAAATACTTGATGTCACTTTGGCTAAAGGT
ATGATGTGTAGACAAGCTCCAGAGATGGTTTCTCATTTCCATATCCACCCACCCAGCTTTCCAATTTTAAAGCCAAT
TCTGAGGTAGAGACTGTGATGAACAAACACCTTGACAAAATTCAACCCAAAGACTCACTTTGCCTAGCTTCAAAATC
CTTACTCTGACATATACTCACAGCCAGAAATTAGCATGCACTAGAGTGTGCATGAGTGCAACACACACACACACCAA
TTCCATATTCTCTGTCAGAAAATCCTGTTGGTTTTTCGTGAAAGGATGTTTTCAGAGGCTGACCCCTTGCCTTCACC
TCCAATGCTACCACTCTGGTCTAAGTCACTGTCACCACCACCTAAATTATAGCTGTTGACTCATAACAATCTTCCTG
CTTCTACCACTGCCCCACTACAATTTCTTCCCAATATACTATCCAAATTAGTCTTTTCAAAATGTAAGTCATATATG
GTCACCTCTTTGTTCAAAGTCTTCTGATAGTTTCCTATATCATTTATAATAAAACCAAATCCTTACAATTCTCTACA
ATAGTTGTTCATGCATATATTATGTTTATTACAGATACGCATATATATAGCTCTCATATAAATAAATATATATATTT
ATGTGTATGTGTGTAGAGTGTTTTTTCTTACAACTCTATGATGTAGGTATTATTAGTGTCCCAAATTTTATAATTTA
GGACTTCTATGATCTCATCTTTTATTCTCCCCTTCACCGAATCTCATCCTACATTGGCCTTATTGATATTCCTTGAA
AATTCTAAGCATCTTACATCTTTAGGGTATTTACATTTGCCATTCCCTATGCCCTAAATATTTAATCATAGTTTCAT
ATAAATGGGTTCCTCATCATCTATGGGTACTCTCTCAGGTGTTAACTTTATAGTGAGGACTTTCCTGCCATACTACT
TAAAGTAGCGATACCCTTTCACCCTGTCCTAATCACACTCTGGCCTTCATTTCAGTTTTTTTTTTTTCTCCATAGCA
CCTAATCTCATTGGTATATAACATGTTTCATTTGCTTATTTAATGTCAAGCTCTTTCCACTATCAAGTCCATGAAAA
CAGGAACTTTATTCCTCTATTCTGTTTTTGTGCTGTATTCTTAGCAATTTTACAATTTTGAATGAAATGAATGAGCA
GTCAAACACATATACAACTATAATTAAAAGGATGTATGCTGACACATCCACTGCTATGCACACACAAAGAAATCAGT
GGAGTAGAGCTGGAAGCGCTAAGCCTGCATAGAGCTAGTTAGCCCTCCGCAGGCAGAGCCTTGATGGGATTACTGAG
TTCTAGAATTGGACTCATTTGTTTTGTAGGCTGAGATTTGCTCTTGAAAACTTGTTCTGACCAAAATAAAAGGCTCA
AAAGATGAATATCGAAACCAGGGTGTTTTTTACACTGGAATTTATAACTAGAGCACTCATGTTTATGTAAGCAATTA
ATTGTTTCATCAGTCAGGTAAAAGTAAAGAAAAACTGTGCCAAGGCAGGTAGCCTAATGCAATATGCCACTAAAGTA
AACATTATTCCATAGGTGTCAGATATGGCTTATTCATCCATCTTCATGGGAAGGATGGCCTTGGCCTGGACATCAGT
GTTATGTGAGGTTCAAAACACCTCTAGGCTATAAGGCAACAGAGCTCCTTTTTTTTTTTTCTGTGCTTTCCTGGCTG
TCCAAATCTCTAATGATAAGCATACTTCTATTCAATGAGAATATTCTGTAAGATTATAGTTAAGAATTGTGGGAGCC
ATTCCGTCTCTTATAGTTAAATTTGAGCTTCTTTTATGATCACTGTTTTTTTAATATGCTTTAAGTTCTGGGGTACA
TGTGCCATGGTGGTTTGCTGCACCCATCAACCCGTCATCTACATTAGGTATTTCTCCTAATGCTATCCTTCCCCTAG
CCCCCCACCCCCAACAGGCCCCAGTGTGTGATGTTCCCCTCCCTGTGTCCATGGATCACTGGTTTTTTTTTTTTTTT
TTTTTTTTTTTTTAAAGTCTCAGTTAAATTTTTGGAATGTAATTTATTTTCCTGGTATCCTAGGACCTGCAAGTTAT
CTGGTCACTTTAGCCCTCACGTTTTGATGATAATCACATATTTGTAAACACAACACACACACACACACACACACACA
TATATATATATAAAACATATATATACATAAACACACATAACATATTTATCGGGCATTTCTGAGCAACTAACTCATGC
AGGACTCTCAAACACTAACCTATAGCCTTTTCTATGTATCTACTTGTGTAGAAACCAAGCGTGGGGACTGAGAAGGC
AATAGCAGGAGCATTCTGACTCTCACTGCCTTTGGCTAGGTCCCTCCCTCATCACAGCTCAGCATAGTCCGAGCTCT
TATCTATATCCACACACAGTTTCTGACGCTGCCCAGCTATCACCATCCCAAGTCTAAAGAAAAAAATAATGGGTTTG
CCCATCTCTGTTGATTAGAAAACAAAACAAAATAAAATAAGCCCCTAAGCTCCCAGAAAACATGACTAAACCAGCAA
GAAGAAGAAAATACAATAGGTATATGAGGAGACTGGTGACACTAGTGTCTGAATGAGGCTTGAGTACAGAAAAGAGG
CTCTAGCAGCATAGTGGTTTAGAGGAGATGTTTCTTTCCTTCACAGATGCCTTAGCCTCAATAAGCTTGCGGTTGTG
GAAGTTTACTTTCAGAACAAACTCCTGTGGGGCTAGAATTATTGATGGCTAAAAGAAGCCCGGGGGAGGGAAAAATC
ATTCAGCATCCTCACCCTTAGTGACACAAAACAGAGGGGGCCTGGTTTTCCATATTTCCTCATGATGGATGATCTCG
TTAATGAAGGTGGTCTGACGAGATCATTGCTTCTTCCATTTAAGCCTTGCTCACTTGCCAATCCTCAGTTTTAACCT
TCTCCAGAGAAATACACATTTTTTATTCAGGAAACATACTATGTTATAGTTTCAATACTAAATAATCAAAGTACTGA
AGATAGCATGCATAGGCAAGAAAAAGTCCTTAGCTTTATGTTGCTGTTGTTTCAGAATTTAAAAAAGATCACCAAGT
CAAGGACTTCTCAGTTCTAGCACTAGAGGTGGAATCTTAGCATATAATCAGAGGTTTTTCAAAATTTCTAGACATGA
GATTCAAAGCCCTGCACTTAAAATAGTCTCATTTGAATTAACTCTTTATATAAATTGAAAGCACATTCTGAACTACT
TCAGAGTATTGTTTTATTTCTATGTTCTTAGTTCATAAATACATTAGGCAATGCAATTTAATTAAAAAAACCCAAGA
ATTTCTTAGAATTTTAATCATGAAAATAAATGAAGGCATCTTTACTTACTCAAGGTCCCAAAAGGTCAAAGAAACCA
GGAAAGTAAAGCTATATTTCAGCGGAAAATGGGATATTTATGAGTTTTCTAAGTTGACAGACTCAAGTTTTAACCTT
CAGTGCCCATGATGTAGGAAAGTGTGGCATAACTGGCTGATTCTGGCTTTCTACTCCTTTTTCCCATTAAAGATCCC
TCCTGCTTAATTAACATTCACAAGTAACTCTGGTTGTACTTTAGGCACAGTGGCTCCCGAGGTCAGTCACACAATAG
GATGTCTGTGCTCCAAGTTGCCAGAGAGAGAGATTACTCTTGAGAATGAGCCTCAGCCCTGGCTCAAACTCACCTGC
AAACTTCGTGAGAGATGAGGCAGAGGTACACTACGAAAGCAACAGTTAGAAGCTAAATGATGAGAACACATGGACTC
ATAGAGGGAAACAACGCATACTGGGGCCTATCAGAGGGTGGAGGGTGAGAGAAGGAGAGGATCAGGAAAAATCACTA
ATGGATGCTAAGCGTAATACCTGAGTGATGAGATCATCTATACAACAAACCCCCTTGACATTCATTTATCTATGTAA
CAAACCTGCACATCCTGTACACGTACCCCTGAACTTAAAATAAAAGTTGAAAACAAGAAAGCAACAGTTTGAACACT
TGTTATGGTCTATTCTCTCATTCTTTACAATTACACTAGAAAATAGCCACAGGCTCCTGCAAGGCAGCCACAGAATT
TATGACTTGTGATATCCAAGTCATTCCTGGATAATGCAAAATCTAACACAAAATCTAGTAGAATCATTTGCTTACAT
CTATTTTTGTTCTGAGAATATAGATTTAGATACATAATGGAAGCAGAATAATTTAAAATCTGGCTAATTTAGAATCC
TAAGCAGCTCTTTTCCTATCAGTGGTTTACAAGCCTTGTTTATATTTTTCCTATTTTAAAAATAAAAATAAAGTAAG
TTATTTGTGGTAAAGAATATTCATTAAAGTATTTATTTCTTAGATAATACCATGAAAAACATTCAGTGAAGTGAAGG
GCCTACTTTACCCAACAAGAATCTAATTTATATAATTTTTCATACTAATAGCATCTAAGAACAGTACAATATTTGAC
TCTTCAGGTTAAACATATGTCATAAATTAGCCAGAAAGATTTAAGAAAATATTGGATGTTTCCTTGTTTAAATTAGG
CATCTTACAGTTTTTAGAATCCTGCATAGAACTTAAGAAATTACAAATGCTAAAGCAAACCCAAACAGGCAGGAATT
AATCTTCATCGAATTTGGGTGTTTCTTTCTAAAAGTCCTTTATACTTAAATGTCTTAAGACATACATAGATTTTATT
TTACTAATTTTAATTATACAGACAATAAATGAATATTCTTACTGATTACTTTTTCTGACTGTCTAATCTTTCTGATC
TATCCTGGATGGCCATAACACTTATCTCTCTGAACTTTGGGCTTTTAATATAGGAAAGAAAAGCAATAATCCATTTT
TCATGGTATCTCATATGATAAACAAATAAAATGCTTAAAAATGAGCAGGTGAAGCAATTTATCTTGAACCAACAAGC
ATCGAAGCAATAATGAGACTGCCCGCAGCCTACCTGACTTCTGAGTCAGGATTTATAAGCCTTGTTACTGAGACACA
AACCTGGGCCTTTCAATGCTATAACCTTTCTTGAAGCTCCTCCCTACCACCTTTAGCCATAAGGAAACATGGAATGG
GTCAGATCCCTGGATGCAAGCCAGGTCTGGAACCATAGGCAGTAAGGAGAGAAGAAAATGTGGGCTCTGCAACTGGC
TCCGAGGGAGCAGGAGAGAATCAACCCCATACTCTGAATCTAAGAGAAGACTGGTGTCCATACTCTGAATGGGAAGA
ATGATGGGATTACCCATAGGGCTTGTTTTAGGGAGAAACCTGTTCTCCAAACTCTTGGCCTTGAGATACCTGGTCCT
TATTCCTTGGACTTTGGCAATGTCTGACCCTCACATTCAAGTTCTGAGGAAGGGCCACTGCCTTCATACTGTGGATC
TGTAGCAAATTCCCCCTGAAAACCCAGAGCTGTATCTTAATTGTTTAAAAAAATTATATTATCTCAAGGACTGTTCT
TCTCTGAGTAGCCAAGCTCAGCTTGGTTCAAGCTACAAGCAGCTGAGCTGCTTTTTGTCTAGTCATTGTTCTTTTAT
TTCAGTGGATCAAATACGTTCTTTCCAAACCTAGGATCTTGTCTTCCTAGGCTATATATTTTGTCCCAGGAAGTCTT
AATCTGGGGTCCACAGAACACTAGGGGGCTGGTGAAGTTTATAGAAAAAAAATCTGTATTTTTACTTACATGTAACT
GAAATTTAGCATTTTCTTCTACTTTGAATGCAAAGGACAAACTAGAATGACATCATCAGTACCTATTGCATAGTTAT
AAAGAGAAACCACAGATATTTTCATACTACACCATAGGTATTGCAGATCTTTTTGTTTTTGTTTTTGTTTGAGATGG
AGTTTCGCTCTTATTGCCCAGGCTGGAGTGCAGTGGCATGATTTCGGCTCACTGCAACCTCCCCTTCCTGCATTCAA
GCAATTCTCCTGCCTTGGCCTCCAGAGTAGCTGGGGATTACAGGCACCTGCCACCATGCCAGTCTAATTTTTGTATT
TTTAGTAGAGATGGGGTTTCGCCATGTTGGCCAGGCTGGTCTTGAACTCCTGACCTCAGATGATCTGCCCGCCTTGG
CCTCCTGAAGTGCTGGGATTATAGGTGTGAGCCACCACGCCTGGCCCATTGCAGATATTTTTAATTCACATTTATCT
GCATCACTACTTGGATCTTAAGGTAGCTGTAGACCCAATCCTAGATCTAATGCTTTCATAAAGAAGCAAATATAATA
AATACTATACCACAAATGTAATGTTTGATGTCTGATAATGATATTTCAGTGTAATTAAACTTAGCACTCCTATGTAT
ATTATTTGATGCAATAAAAACATATTTTTTTTAGCACTTACAGTCTGCCAAACTGGCCTGTGACACAAAAAAAGTTT
AGGAATTCCTGGTTTTGTCTGTGTTAGCCAATGGTTAGAATATATGCTCAGAAAGATACCATTGGTTAATAGCTGAA
AGAAAATGGAGTAGAAATTCAGTGGCCTGGAATAATAACAATTTGGGCAGTCATTAAGTCAGGTGAAGACTTCTGGA
ATCATGGGAGAAAAGCAAGGGAGACATTCTTACTTGCCACAAGTGTTTTTTTTTTTTTTTTTTTATCACAAACATAA
GAAAATATAATAAATAACAAAGTCAGGTTATAGAAGAGAGAAACGCTCTTAGTAAACTTGGAATATGGAATCCCCAA
AGGCACTTGACTTGGGAGACAGGAGCCATACTGCTAAGTGAAAAAGACGAAGAACCTCTAGGGCCTGAACATAGGAA
ATTGTAGGAACAGAAATTCCTAGATCTGGTGGGGCAAGGGGAGCCATAGGAGAAAGAAATGGTAGAAATGGATGGAG
ACGGAGGCAGAGGTGGGCAGATCATGAGGTCAAGAGATCGAGACCATCCTGGCAAACATGGTGAAATCCCGTCTCTA
CTAAAAATAAAAAAATTAGCTGGGCATGGTGGCATGCGCCTGTAGTCCCAGCTGCTCGGGAGGCTGAGGCAGGAGAA
TCGTTTGAACCCAGGAGGCGAAGGTTGCAGTGAGCTGAGATAGTGCCATTGCACTCCAGTCTGGCAACAGAGTGAGA
CTCCGTCTCAAAAAAAAAAAAAAGAAAGAAAGAAAAGAAAAAGAAAAAAGAAAAAATAAATGGATGTAGAACAAGCC
AGAAGGAGGAACTGGGCTGGGGCAATGAGATTATGGTGATGTAAGGGACTTTTATAGAATTAACAATGCTGGAATTT
GTGGAACTCTGCTTCTATTATTCCCCCAATCATTACTTCTGTCACATTGATAGTTAAATAATTTCTGTGAATTTATT
CCTTGATTCTAAAATATGAGGATAATGACAATGGTATTATAAGGGCAGATTAAGTGATATAGCATAAGCAATATTCT
TCAGGCACATGGATCGAATTGAATACACTGTAAATCCCAACTTCCAGTTTCAGCTCTACCAAGTAAAGAGCTAGCAA
GTCATCAAAATGGGGACATACAGAAAAAAAAAAGGACACTAGAGGAATAATATACCCTGACTCCTAGCCTGATTAAT
ATATCGATTCACTTTTTTCTCTGTTTGATGACAAATTCTGGCTTTAAATAATTTTAGGATTTTAGGCTTCTCAGCTC
CCTTCCCAGTGAGAAGTATAAGCAGGACAGACAGGCAAGCAAGAAGAGAGCCCCAGGCAATACTCACAAAGTAGCCA
GTGTCCCCTGTGGTCATAGAGAAATGAAAAGAGAGAGGATTCCCTGGAAGCACTGGATGTAATCTTTTCTGTCTGTC
CTCTCTAGGGAATCACCCCAAGGTACTGTACTTTGGGATTAAGGCTTTAGTCCCACTGTGGACTACTTGCTATTCTG
TTCAGTTTCTAGAAGGAACTATGTACGGTTTTTGTCTCCCTAGAGAAACTAAGGTACAGAAGTTTTGTTTACAATGC
ACTCCTTAAGAGAGCTAGAACTGGGTGAGATTCTGTTTTAACAGCTTTATTTTCTTTTCCTTGGCCCTGTTTTTGTC
AACTGTCACCACCTTTAAGGCAAATGTTAAATGTGCTTTGGCTGAAACTTTTTTTCCTATTTTGAGATTTGCTCCTT
TATATGAGGCTTTCTTGGAAAAGGAGAATGGGAGAGATGGATATCATTTTGGAAGATGATGAAGAGGGTAAAAAAGG
GGACAAATGGAAATTTGTGTTGCAGATAGATGAGGAGCCAACAAAAAAGAGCCTCAGGATCCAGCACACATTATCAC
AAACTTAGTGTCCATCCATCACTGCTGACCCTCTCCGGACCTGACTCCACCCCTGAGGACACAGGTCAGCCTTGACC
AATGACTTTTAAGTACCATGGAGAACAGGGGGCCAGAACTTCGGCAGTAAAGAATAAAAGGCCAGACAGAGAGGCAG
CAGCACATATCTGCTTCCGACACAGCTGCAATCACTAGCAAGCTCTCAGGCCTGGCATCATGGTGCATTTTACTGCT
GAGGAGAAGGCTGCCGTCACTAGCCTGTGGAGCAAGATGAATGTGGAAGAGGCTGGAGGTGAAGCCTTGGGCAGGTA
AGCATTGGTTCTCAATGCATGGGAATGAAGGGTGAATATTACCCTAGCAAGTTGATTGGGAAAGTCCTCAAGATTTT
TTGCATCTCTAATTTTGTATCTGATATGGTGTCATTTCATAGACTCCTCGTTGTTTACCCCTGGACCCAGAGATTTT
TTGACAGCTTTGGAAACCTGTCGTCTCCCTCTGCCATCCTGGGCAACCCCAAGGTCAAGGCCCATGGCAAGAAGGTG
CTGACTTCCTTTGGAGATGCTATTAAAAACATGGACAACCTCAAGCCCGCCTTTGCTAAGCTGAGTGAGCTGCACTG
TGACAAGCTGCATGTGGATCCTGAGAACTTCAAGGTGAGTTCAGGTGCTGGTGATGTGATTTTTTGGCTTTATATTT
TGACATTAATTGAAGCTCATAATCTTATTGGAAAGACCAACAAAGATCTCAGAAATCATGGGTCGAGCTTGATGTTA
GAACAGCAGACTTCTAGTGAGCATAACCAAAACTTACATGATTCAGAACTAGTGACAGTAAAGGACTACTAACAGCC
TGAATTGGCTTAACTTTTCAGGAAATCTTGCCAGAACTTGATGTGTTTATCCCAGAGAATTGTATTATAGAATTGTA
GACTTGTGAAAGAAGAATGAAATTTGGCTTTTGGTAGATGAAAGTCCATTTCAAGGAAATAGAAATGCCTTATTTTA
TGTGGGTCATGATAATTGAGGTTTAGAAGAGATTTTTGCAAAAAAAATAAAAGATTTGCTCAAAGAAAAATAAGACA
CATTTTCTAAAATATGTTAAATTTCCCATCAGTATTGTGACCAAGTGAAGGCTTGTTTCCGAATTTGTTGGGGATTT
TAAACTCCCGCTGAGAACTCTTGCAGCACTCACATTCTACATTTACAAAAATTAGACAATTGCTTAAAGAAAAACAG
GGAGAGAGGGAACCCAATAATACTGGTAAAATGGGGAAGGGGGTGAGGGTGTAGGTAGGTAGAATGTTGAATGTAGG
GCTCATAGAATAAAATTGAACCTAAGCTCATCTGAATTTTTTGGGTGGGCACAAACCTTGGAACAGTTTGAGGTCAG
GGTTGTCTAGGAATGTAGGTATAAAGCCGTTTTTGTTTGTTTGTTTGTTTTTTCATCAAGTTGTTTTCGGAAACTTC
TACTCAACATGCCTGTGTGTTATTTTGTCTTTTGCCTAACAGCTCCTGGGTAACGTGATGGTGATTATTCTGGCTAC
TCACTTTGGCAAGGAGTTCACCCCTGAAGTGCAGGCTGCCTGGCAGAAGCTGGTGTCTGCTGTCGCCATTGCCCTGG
CCCATAAGTACCACTGAGTTCTCTTCCAGTTTGCAGGTCTTCCTGTGACCCTGACACCCTCCTTCTGCACATGGGGA
CTGGGCTTGGCCTTGAGAGAAAGCCTTCTGTTTAATAAAGTACATTTTCTTCAGTAATCAAAAATTGCAATTTTATC
TTCTCCATCTTTTACTCTTGTGTTAAAAGGAAAAAGTGTTCATGGGCTGAGGGATGGAGAGAAACATAGGAAGAACC
AAGAGCTTCCTTAAGAAATGTATGGGGGCTTGTAAAATTAATGTGGATGTTATGGGAGAATTCCCAAGATTCCCAAG
GAGGATGATATGATGGAGAAAAATCTTTATCGGGGTGGGAAAATGGTTAATTAAGTGGCAGAGACTCCTAGGCAGTT
TTTACTGCACCGGGGAAAGAAGGAGCTGTTGTGGTACCTGAGAAAGCAGATTTGTGGTACATGTCACTTTTCATTAA
AAACAAAAACAAAACAAAACAAAACTTCATAGATATCCAAGATATAGGCTGAGAATTACTATTTTAATTTACTCTTA
TTTACATTTTGAAGTAGCTAGCTTGTCACATGTTTTATGAAATTGATTTGGAGATAAGATGAGTGTGTATCAACAAT
AGCCTGCTCTTTCCATGAAGGATTCCATTATTTCATGGGTTAGCTGAAGCTAAGACACATGATATCATTGTGCATTA
TCTTCTGATACAATGTAACATGCACTAAAATAAAGTTAGAGTTAGGACCTGAGTGGGAAAGTTTTTGGAGAGTGTGA
TGAAGACTTTCCGTGGGAGATAGAATACTAATAAAGGCTTAAATTCTAAAACCAGCAAGCTAGGGCTTCGTGACTTG
CATGAAACTGGCTCTCTGGAAGTAGAAGGGAGAGTAAGACATACGTAGAGGACTAGGAAAGACCAGATAGTACAGGG
CCTGGCTACAAAAATACAAGCTTTTACTATGCTATTGCAATACTAAACGATAAGCATTAGGATGTTAAGTGACTCAG
GAAATAAGATTTTGGGAAAAAGTAATCTGCTTATGTGCACAAAATGGATTCAAGTTTGCAGATAAAATAAAATATGG
ATGATGATTCAAGGGGACAGATACAATGGTTCAAACCCAAGAGGAGCAGTGAGTCTGTGGAATTTTGAAGGATGGAC
AAAGGTGGGGTGAGAAAGACATAGTATTCGACCTGACTGTGGGAGATGAGAAGGAAGAAGGAGGTGATAAATGACTG
AAAGCTCCCAGACTGGTGAAGATAACAGGAGGAAACCATGCACTTGACCCTGGTGACTCTCATGTGTGAAGGGTAGA
GGGATATTAACAGATTTACTTTTTAGGAAGTGCTAGATTGGTCAGGGAGTTTTGACCTTCAGGTCTTGTGTCTTTCA
TATCAAGGAACCTTTGCATTTTCCAAGTTAGAGTGCCATATTTTGGCAAATATAACTTTATTAGTAATTTTATAGTG
CTCTCACATTGATCAGACTTTTTCCTGTGAATTACTTTTGAATTTGGCTGTATATATCCAGAATATGGGAGAGAGAC
AAATAATTATTGTAGTTGCAGGCTATCAACAATACTGGTCTCTCTGAGCCTTATAACCTTTCAATATGCCCCATAAA
CAGAGTAAACAGGGATTATTCATGGCACTAAATATTTTCACCTAGGTCAGTCAACAAATGGAGGCAATGTGCATTTT
TTGATACATATTTTTATATATTTATGGGGCATGTGATACTTACATGCCTAGAACATGTGACTGATTAAGTCTAGATA
TTTAGGATATCCATTACTTTGAGCATTTATCATTTCTATGTATTGAGAAAATTTCAAATCCTCATTTCTGACCATTT
TGAAATATATAATAAATAGTAATTAACTATAGTCACCCTACTCAAATATCAACATTATAAACTAACTAATCCTTCTT
TCCACTTTTTTACCAACCAACATCTCTTAAATCCCCTGCCATACACATCACACATTTTTCAGCTCTGATAACTATCA
TTCTACTCTCATACCACCATGAGACCACTTTTTTAGCTCCACAGATGAATAAAAACATGTGATATTTGACTTTCTGT
ATCTGGCTTATTTTATTATCTATCTCTTTGGCATACCAAGAGTTTGTTTTTGTTCTGCTTCAGGGCTTTCAATTAAC
ATAATGACCTCTGGTTCCATCCATGTTGCTACAAATGACAAGATTTCATTCTTTTTCATGGCAAAATAGTACTGTGC
AAAAAATACAATTTTTTAATCCGTTCATCTGTTGATAGACACTTAGGTTGATCCCAAACCTTAACTATTGTGAATAG
GTGCTTCAATAAACATGAGTGTAATGTGTCCATTGGATATACTGATTTCCTTTCTTTTGGATAAATAACCACTAGTG
AGATTGCTGGATTGTATGATAGTTCTGTTTTTAGTTTATTGAGAAATCTTCATACTGTTTTCCATAATGGTTGTACT
ATTTTACATTCCCACCAACAGTGTGTAAGAAAGAGTTCCCTTTTCTCCATATCCTCACAAGGATCTGTTATTTTTTG
TCTTTTTTGTTAATAGCATTTTAACTAGAGTAAGTAGATATCTCATTGTAGTTTTGATTTGCATTTCCCTGATCATT
AGTGATGTTGAGATTTTTTCATATGTTTGTTGGTCATTTGTATATCTTTTTCTGAGATTGTCTGTTCATGTCCTTAT
CCTACTTTTATTGGGATTGTTGTTATTTTCTTGATAATCATTGTGTCATTTTAGAGCCTGGATATTATTCTTTTGTC
AGATGTATAGATTGTGAAGATTTTCTCCTCTGTGGGTTGTCTGTTTATTCTGCAGACTCTTCCTTTTGCCATGCAAA
AGCTCTTTAGTTTAATTTAGTCCCAGATATTTTCTTTGTTTTTATGTGTTTGCATTTGTGTTCTTGTCATGAAATCC
TTTCCTAAGCCAATGTGTAGAAGGGTTTTTCCGATGTTATTTTCTAGAATTGTTACAGTTTCAGGCTTAGATTTAAG
TCCTTGATCCATCTTAAGTTGATTTTTGTATAAGGTGAGAGATGAAGATCCAGTTTCATTCTCCTACATGTAGCTTG
CCAGCTATCCCGACTCATTTGTTGAATAGGGTGCCCTTTCCCATTTATGTTTTTGTTTGCTTTGTCAAAGATCAGTT
CGGATGTAAGTATTTGAGTTTATTTCTGGGTTCTCTATTCTGTTCCATTGGTCCGATGTGCCTATTTGTACACCAGC
ATCATGCTGTGTTTTTGGTGACTATGGCCTTATTGTATAGTTTGAAATGAGGTAATGTAATGCCATTCAGATTTGTT
CTTTTTTTTAGACTTGCTTGTTTATTGGGCTCTTTTTTGGTTCCATAAGAATTTTAGGATTGTTTTTTCTAGTTCTG
TGAAGGCTAATGGTGGTATTTATGGGAATTGCAATGCAATTTGTAGGTTGCTTCTGGCATTATGGCCATTTTCACAA
TATTGATTCTACCCATCTATGAGAATGGCATGTGTTTCCATTTGTTTGTGTCTTATATGATTACTATCAGCCGTGTT
TTGTAGTTTTCCTTGTAGATGTCTTTCACCTCCTTGGTTAGGTATATATTCCTAAGTTTTTGTTTTGTTTTGTTTTG
TTTTTTGCAGCTATTGTAAAAGGGGTTGAGTTATTGATTTTATTCTCATCTTGGTCATTGCTGGTATGTAAGAAAGC
AACTCATTGGTGTACGTTAATTTTGTATCCAGAAACTTTGCTGAATTATTTTATCAGTTCTAGGGGGTTTTGGAGGA
GTCTTTAGAGTTTTCTACATACACAATCATATCATCAGCAAACAGTGACAGTTTGACTTTCTCTTTAACAATTTGGA
TGTGCTTTACTTGTTTCTCTTGTCTGATTGCTCTTGCTAGGACTTCCAGTAATATGTTAAAGAGAAGTGGTGAGAGT
GGGTATCCTTGTCTCATTCCAGTTTTCAGACAGAATGCTTTTAACTTTTTCCCATTCAATATAATGTTGGCTGTGTG
TTTACCATAGCTGGCTTTTATTACATTGAGGTATGTCCTTTGTAAACCGATTTTGCTGAGTTTTAGTCATAAAGTGA
TGTTGAATTTTGTTGAATGCAGTTTCTGTGGCTATTGAGATAATCACATGATTTTTGTTTCCAATTCTCTTTATGTT
GTGTATCACACTTATTGACTTGCGTATGTTAAACCATCCGTGCATCCCTCGCATGAAACCACTTGATCATGGGTTTT
GATATGCCGTGTGGGATGCTATTAGCTATATTTTGTCAAGGATGTTGGCATCTATGTTCATCAGGGATATTGATCTG
TAGTGTTTTTTTTTTTTGGTTATGTTCTTTCCCAGTTTTGGTATTAAGGTGATACTGGCTTCATAGAATGATTTAGG
GAGGATTCTCTCTTTCTCTATCTTGTAGAATACTGTCAATAGGATTGGTATCAATTCTTCTTTGAATGTCTGGTAGA
ATTCGAACGTCTCCTTTAGGTTTTCTAGTTTATTCATGTAAAGGTGTTCATAGTAACCTTGAATAATCTTTTGTATT
TCTGTGGTATCAGTAATAGTATCTCCTGTTTTGTTTCTAACTGAGTTTATTTGCACTTCTCTCCTCTTTTCTTGGTT
AATCTTGCTAATGGTCTATCAGTTTTATTTATCTTTTCAAAGAACCAGCTTTTTATTTCATTTAGCTTTTGTATTTT
TTTGCAGTTGTTTTAATTTCATTTAGTTCTCCTCTTATCTTAGTTATTCCCTTTCTTTTGCTGGGTTTTGGTTCTGT
TTGTTTTTGTTTCTCTAGTTTCTTGTGGTGTGACCTTATATTGTCTGTCCTCTTTCAGACTCTTTGACATCGACATT
TAGGGCTGTGAACTTTCCTTTTAGCACCATCTTTGCTGTATCCTAGAGGTTTTGATAGGTGTGTCACTATTGTCGGT
CAGTTCAAGTAATTTTGTTGTTCTTATTATACTTTAAGTTCTGGGATACATGTGCAGAATGTGCAGGTTTGTTACAT
AGGTATAGATGTGCCATGGTGGTTTGCTGCTCCCATCAACCTGTCATCTACATTAGGTATTTCTTTTAATGTTATCC
CTCTCCTAACCCCCTCACCCCCCGACAGGCCCTGGTGTGTGATGTTCCCCTCCCTGTGTCCATGTGTTCTCATTGTT
CAACTCCCACTTATGAGTGAGAACGTGTGGTGTTTGGTTTCTCTGTTCCTGTGTTAGTTTGCTCAGAATGATGTTTC
CACCTTCACCATGTCCCTGCAAAGACATGAACTCATCATTTTATGGCTGCATATATTCCATGGTGTATATGTGCCAC
ATTTTCTTTATCCATTATATCGCTGATGGCCATTTGGGTTGGTTCCAAGTCTTTGGTATTGTGAATAGTGCCGCAAT
AAACATACGTGTGCACATGTCTTTATAGTAGAATGATTTCTAATTCTTTGGGTATATACCCAGTAATGGGATTGCTG
GGTCAAACAGTATTTCTGGTTCTAGATCCTTGAGGAATTGCCACACTGTCTTCCACAATGGTTGAACTAATTTACAC
ACCCATCAACAGTGTAAAATTTTTCCTATTCTTCCACATCCTCTCCAGCACCTTTTGTTTCCTGACTTTTTAATAAT
TGCCATTCTAACTGGCATGAGATGGTATCTCATTGTGGTTTTGATTTGCATTTCTCTAATGACCAGTGATGATGAGC
TTCTTTTCATGTGTTTCTTGGCCACATAAATGACTTCTTTAGAGAAGCATCTGTTCATATCCTTTGTCCACTTTTTG
ATGGGGTCGTTAGGTTTTTTCTTGTAAATTTGTTGAAGTTCTTTGTAGATTTTGGATGTTAGCCCTTTGTCAGATGG
ATAGATTGGCAAAAATTTTCTCCCATTCTGTAGGTTGCCTGTTCACTCTGATGATAGTCTTTTGCTGTGCAGAAGCT
CTTTAGTTTAATTAGATCCCATATGTCAATTTTGGCCTTTGTTGTCATTGCTTTTGATGTTTAGTCGTGGAATTTTG
CCCATGCCTATGTCCTGAATGGTATTGCCTAGGTTATCTTCTAGGATTTTTATGGTTTTAGGTTGCACATTTAAGTC
TTTAATCCACCTTGAGTTAATTTTTGTATAAGGTGTAAGGAAGGGGTACAGTTTCAGTTTTATGCATATTGCTAGCC
AGTTTTTCCAGCACCATTTATTAAATAGGGAATTCTTTCTCCATTGCTTTTGTGATGTTTGTCAAAGATCAGATGGT
CGTAGATGTGTGGCATTATTTCTGAGGCTTCTGTTCTGTTCCACTGGTCTATATATCTGTTTTGGTACCAGTACCAT
GCTGTTTTTGTTACTGTAGCCTTGTAGTATAGCTTGAAGTCAGGTAGCATCATGCCTCCAGCTTTGTTCTTTTTGTT
TAGGATTGTCTTGGCTATATGGGCTCTTTTTTGATTCCATATGACATTTAAAGTAGTTTTTTCTAATTCTTTGAAAA
AAGTCAGTGGTAGCTTGATGGGGATAGCATTGAATCTATAAATTACTTTGGGCAGTATGGCCATTTTAAAGATATTG
ATTCTTTCTATCTATGAGCATGGAATGTTTTTCCATTTGTTTGTGTCCTCTCTTATTTCCTTGAGCAGTGAGTGGTT
TGTAGCTCTCCTTGAAGAGGTTCTTCACATCCCTTATAAGTTGTATTTCTAGGTATTTTATTTTATTCTCTTTGCAG
CAATTGTGAATGGGAGTTCACCCATGATTTGGCTCTCTGCTTGTCTATTATTGGTGTATAGGAATGCTTGTGATTTT
TGCACACTGATTTTGTATCTTGAGACTTTGCTGAAGCTGTTTATCAGCTTAAGATTTTGGGCTGAGATGACAGGGTC
TTCTAAATATACAATCATGTCATCTGCAAACAGAGACAATTTGACTTCCTCTCTTCCTATTTGAATATGCTTTATTT
CTTTCTCTTGCCTGATTGTCCTGGCGAGAACTTCCAATACTATGTTGAGTAAGAGTGGCGAGAGGGCATCCTTGTCT
TGTGCCGGTTTTCAAAGCAAATGATTTTTAAATTTCCGTCTTGATTTCATTGTTGACCCAATGATCATTCAGGAGCA
GGTTATTTAATTTCCCTGTATTTGCATGGTTTTGAAGGTTCCTTTTGTAGTTGATTTCCAATTTTATTCTACTGTGG
TCTGAGAGAGTGCTTGATATAATTTCAATTTTTAAAAATTTATTGAGGCTTGTTTTGTGGCATATCATATGGCCTAT
CTTGGAGAAAGTTCCATGTGCTGATGAATAGAATGTGTATTCTGCAGTTGTTGGGTAGAATGTCCTGTAAATATCTG
TTAAGTCCATTTGTTCTTTAAATCCATTGTTTCTTTGTAGACTGTCTTGATGACCTGCCTAGTGCAGTCAGTGGAGT
ATTGAAGTCCCCCACTATTATTATGTTGCTGTCTAGTAGTAATTGTTTTATAAATTTGGGATCTCCAGTATTAGATG
CATATATATTAAGAATTGTAATATTCTCCCATTGGACAAGGGCTTTTATCATTATATGATGTCCCTCTTTGTCTTTT
TTAACTGCTGTTTCTTTAAAGTTTGTTTTGTCTGACATAAGAATAGCTGCTTTGGCTCGCTTTTGGTGTCCATTTGT
GTGGAATGTCATTTTCCACCCCTTTACCTTAAGTTTATGTGAGTCCTTATGTGTTAGGTGAGTCTCCTGAAGGCGGC
AGATAACTGGTTGGTGAATTCTATTCATTCTGCAATTCTGTATCTTTTAAGTGGAGCATTTAGTCCATTTACATTCA
ACATCAGTATTGAGGTGTGAGGTGACTATTCCATTCTTCGTGGTATTTGTTGCCTGTGTATCTTTTTATCTGTATTT
TTGTTGTATATGTCCTATGGGATTTATGCTTTAAAGAGGTTCTGTTTTGATGTGCTTCCAGGGTTTATTTCAAGATT
TAGAGCTCCTTTTATCATTCTTGTAGTGTTGGCTTGGTAGTGCCGAATTCTCTCAGCATTTGTTTTTCTGAAAAACA
CTGTGTATTTTCTTCATTTGTGAAGCTTAGTTTCACTGGATATAAAATTCTTGGCTGATAATTGTTTTGTTTAAGAA
GGCTGAAGATAGGGCCATATTCACTTCTAGCTTTTACGGTTTCTGCTGAGAAATCTGCTGTTAATCTGATAGGTTTT
CTTTCATAGGTTACCTGGTAGTTTCACCTCACAGCTCTTAAGATTCTCTTTGTCTTTAGATAACTTTGGATACTCTG
ATGACAATGTACCTAGGCAATGATATTTTTGCAATGAATTTCCCAGGTGTTTATTGAGCTTCTTTGTATTTGGATAT
CTAGGTCTCTAGCAAGGAGGGGGAAGTTTTCCTTGATTATTTCCATGGACAAGTTTTCCAAACTTTTAGATTTCTCT
TCTTTCTCAGGAATGCTGATTATTCTTAGGTTTGATTGTTTAACATAATCCCAGATTTCTTGGAGGCTTTGTTCATA
TTTTCTTATTCTTTTTTCTTTGTCTTTGTTGGATTGGGTAATTCAAAAACTTTGTCTTCAAGCTCTGAATTTCTTCT
GCTTGGATTCTATTGCTGAGACTTTCTAGAGCATTTTGCATTTCTATAAGTGCATCCATTCATCCATTGTTTCCTGA
AGTTTTGAATGTTTTTTATTTATGCTATCTCTTTAACTGAAGATTTCTCCCCTCATTTCTTGTATCATATTTTTGGT
TTTTTTAAAATTGGACTTCACCTTCCTCGGATGCCTCCTTGATTAGCTTAATAACTGACCTTCTGAATTATTTTTCA
GGTAAATCAGGGATTTCTTCTTGGTTTGGATGCATTGCTGGTGAGCTAGTATGATTTTTTGGGGGGTGTTAAAGAAC
CTTGTTTTTCATATTACCAGAGTTAGTTTTCTGGTTCCTTCTCACTTGGGTAGGCTCTGTCAGAGGGAAAGTCTAGG
CCTCAAGGCTGAGACTTTTGTCCCAGCAGGTGTTCCCTTGATGTAGCACAGTCCCCCTTTTCCTAGGACGTGGGGCT
TCCTGAGAGCCGAACTGTAGTGATTGTTATCTCTCTTCTGGATCTAGCCACCCATCAGGTCTACCAGACTCCAGGCT
GGTACTGGGGTTTGTCTGCACAGAGTCTTGTGACGTGAACCATCTGTGGGTCTCTCAGCCATAGATACAACCACCTG
CTCCAATGGAGGTGGTAGAGGATGAAATGAACTCTGTGAGGGTCCTTACTTTTGGTTGTTCAATGCACTATCTTTTT
GTGCTGGTTGGCCTCCTGCCAGGAGGTGGCACTTTCTAGAAAGCATCAGCAGAGGCAGTCAGGTGGTGGTGGCTGGG
GGGGCTGGGGCACTAGAACTCCCAAGAATATATGCCCTTTGTCTTCAGCTACTAGGGTGAGTAAGGAAGGACCATCA
GGTGGGGGCAGGACTAGTCGTGTCTGAGCTCAGAGTCTCCTTGGGCAGGTCTTTCTGTGGCTACTGTGGGAGGATGG
GGGTGTAGTTTCCAGGTCAATGGATTTATGTTCCTAGGACAATTATGGCTGCCTCTGCTGTGTCATGCAGGTCATCA
GGAAAGTGGGGGAAAGCAAGCAGTCACGTGACTTGCCCAGCTCCCATGCAACTCAAAAGGTTGGTCTCACTTCCAGC
GTGCACCCTCCCCCGCAACAGCTCCGAATCTGTTTCCATGCAGTCAGTGAGCAAGGCTGAGAACTTGCCCAGGCTAC
CAGCTGCGAAACCAAGTAGGGCTGTCCTACTTCCCTGCCAGTGGAGTCTGCACACCAAATTCATGTCCCCCCACCAA
CCCCCCCACTGCCCAGCCCCTAGATCTGGCCAGGTGGAGATTTTCTTTTTCCTGTCTCTTTTCCCAGTTCCTCTGGC
AGCCCTCCCAAATGACCCCTGTGAGGCAAGGCAGAAATGGCTTCCTAGGGGACCCAGAGAGCCCACAGGGCTTTTCC
CGCTGCTTCCTCTACCCCTGTATTTTGCTTGGCCCTCTAAATTGACTCAGCTCCAGGTAAGGTCAGAATCTTCTCCT
GTGGTCTAGATCTTCAGGTTCCCAGTGAGGATGTGTGTTTGGGGGTAGACGGTCCCCCTTTTCCACTTCCACAGTTT
GGGCACTCACAATATTTGGGGTGTTTCCCGGGTCCTACATGAGCAATCTGCTTCTTTCAGAGGGTGTGTGCGTTCTC
TCAGCTTTCTTGAATTTATTTCTGCAGGTGGTTCTGCAAAAAAAATTCCTGATGGGAGACTTCACATGCTGCTCTGT
GCATCCGAGTGGGAGCTGCAATGTACTTCTGCTGCCACCCATCTGCCATCACCCTCTAATTTGTCGGTAATATGCAT
TTTTAATCAATCTTTTTTTCTCTCTCTCTCTTTTCTTCTCCCCCAAAACTATACTGCCCTTTGATATCAAGGAATCA
AGGCCGTGATGTTGAGGGGTGGGCAGTGGATACACTCTTTACCCCTTAGGGAGCATATCTAGATTTAGATATTGCCA
ATTCAAGATAACTTAATTGAAAGCAAATTCATAATGAATACACACACACACACACACATCTGCATGACAAGATTTTT
AATAGTTGAAAGAATAACTAATAATTGTCCACAGGCAATAAGGGCTTTTTAAGCAAAACAGTTGTGATAAAACAGGT
CATTCTTAGAATAGTAATCCAGCCAATAGTACAGGTTGCTTAGAGATTATGACATTACCAGAGTTAAAATTCAATAA
TGGCTTCTCACTCCCTACCACTGAGGACAAGTTTATGTCCTTAGGTTTATGCTTCCCTGAAACAATACCACCTGCTA
TTCTCCACTTTACATATCAACGGCACTGGTTCTTTATCTAACTCTCTGGCACAGCAGGAGTTTGTTTTCTTCTGCTT
CAGAGCTTTGAATTTACTATTTCAGCTTCTAAACTTTATTTGCAATGCCTTCCCATGGCAGACTCCTTCTGTCATTT
TGCCTCTGTTCGAAAACTTTTTCCTTAATTTCATTCTTAGTTAATAATATCTGAAATTATTTTGTTGTTTAACTTAA
TTATTAATTTTATGTATGTTCTACCTAGATATAATCTTCTAGAGGATTGTTTTATTCTCTGACTTATTTAACTTAAA
TGCCCACTACCTTTAAAAATTATGACATTTATTTAACAGATATTTGCTGAACAAATGTTTGAAAATACATGGGAAAG
AATGCTTGAAAACACTTGAAATTGCTTGTGTAAAGAAACAGTTTTATCAGTTAGGATTTAATCAATGTCAGAAGCAA
TGATATAGGAAAAATCGAGGAATAAGACAGTTATGGATAAGGAGAAATCAACAAACTCTTAAAAGATATTGCCTCAA
AAGCATAAGAGGAAATAAGGGTTTATACATGACTTTTAGAACACTGCCTGGGTTTTTGGATAAATGGGGAAGTTGTT
GGAAAACAGGAGGGATCCTAGATATTCCTTAGTCTGAGGAGGAGCAATTAAGATTCACTTGTTTAGAGGCTGGGAGT
GGTGGCTCACGCCTGTAATCCCAGAATTTTGGGAGGCCAAGGCAGGCAGATCACCTGAGGTCAAGAGTTCAAGACCA
ACCTGGCCAACATGGTGAAATCCCATCTCTACAAAAATACAAAAATTAGACAGGCATGATGGCAAGTGCCTGTAATC
CCAGCTACTTGGGAGGCTGAGGAAGGAGAATTGCTTGAACCTGGAAGGCAGGAGTTGCAGTGAGCCGAGATCATACC
ACTGCACTCCAGCCTGGGTGACAGAACAAGACTCTGTCTCAAAAAAAAAAAAGAGAGATTCAAAAGATTCACTTGTT
TAGGCCTTAGCGGGCTTAGACACCAGTCTCTGACACATTCTTAAAGGTCAGGCTCTACAAATGGAACCCAACCAGAC
TCTCAGATATGGCCAAAGATCTATACACACCCATCTCACAGATCCCCTATCTTAAAGAGACCCTAATTTGGGTTCAC
CTCAGTCTCTATAATCTGTACCAGCATACCAATAAAAATCTTTCTCACCCATCCTTAGATTGAGAGAAGTCACTTAT
TATTATGTGAGTAACTGGAAGATACTGATAAGTTGACAAATCTTTTTCTTTCCTTTCTTATTCAACTTTTATTTTAA
CTTCCAAAGAACAAGTGCAATATGTGCAGCTTTGTTGCGCAGGTCAACATGTATCTTTCTGGTCTTTTAGCCGCCTA
ACACTTTGAGCAGATATAAGCCTTACACAGGATTATGAAGTCTGAAAGGATTCCACCAATATTATTATAATTCCTAT
CAACCTGATAAGTTAGGGGAAGGTAGAGCTCTCCTCCAATAAGCCAGATTTCCAGAGTTTCTGACGTCATAATCTAC
CAAGGTCATGGATCGAGTTCAGAGAAAAAACAAAAGCAAAACCAAACCTACCAAAAAATAAAAATCCCAAAGAAAAA
ATAAAGAAAAAAACAGCATGAATACTTCCTGCCATGTTAAGTGGCCAATATGTCAGAAACAGCACTGAGTTACAGAT
AAAGATGTCTAAACTACAGTGACATCCCAGCTGTCACAGTGTGTGGACTATTAGTCAATAAAACAGTCCCTGCCTCT
TAAGAGTTGTTTTCCATGCAAATACATGTCTTATGTCTTAGAATAAGATTCCCTAAGAAGTGAACCTAGCATTTATA
CAAGATAATTAATTCTAATCCATAGTATCTGGTAAAGAGCATTCTACCATCATCTTTACCGAGCATAGAAGAGCTAC
ACCAAAACCCTGGGTCATCAGCCAGCACATACACTTATCCAGTGATAAATACACATCATCGGGTGCCTACATACATA
CCTGAATATAAAAAAAATACTTTTGCTGAGATGAAACAGGCGTGATTTATTTCAAATAGGTACGGATAAGTAGATAT
TGAAGTAAGGATTCAGTCTTATATTATATTACATAACATTAATCTATTCCTGCACTGAAACTGTTGCTTTATAGGAT
TTTTCACTACACTAATGAGAACTTAAGAGATAATGGCCTAAAACCACAGAGAGTATATTCAAGAATAAGTATAGCAC
TTCTTATTTGGAAACCAATGCTTACTAAATGAGACTAAGACGTGTCCCATCAAAAATCCTGGACCTATGCCTAAAAC
ACATTTCACAATCCCTGAACTTTTCAAAAATTGGTACATGCTTTAACTTTAAACTACAGGCCTCACTGGAGCTACAG
ACAAGAAGGTGAAAAACGGCTGACAAAAGAAGTCCTGGTATCTTCTATGGTGGGAGAAGAAAACTAGCTAAAGGGAA
GAATAAATTAGAGAAAAATTGGAATGACTGAATCGGAACAAGGCAAAGGCTATAAAAAAAATTAAGCAGCAGTATCC
TCTTGGGGGCCCCTTCCCCACACTATCTCAATGCAAATATCTGTCTGAAACGGTTCCTGGCTAAACTCCACCCATGG
GTTGGCCAGCCTTGCCTTGACCAATAGCCTTGACAAGGCAAACTTGACCAATAGTCTTAGAGTATCCAGTGAGGCCA
GGGGCCGGCGGCTGGCTAGGGATGAAGAATAAAAGGAAGCACCCTTCAGCAGTTCCACACACTCGCTTCTGGAACGT
CTGAGGTTATCAATAAGCTCCTAGTCCAGACGCCATGGGTCATTTCACAGAGGAGGACAAGGCTACTATCACAAGCC
TGTGGGGCAAGGTGAATGTGGAAGATGCTGGAGGAGAAACCCTGGGAAGGTAGGCTCTGGTGACCAGGACAAGGGAG
GGAAGGAAGGACCCTGTGCCTGGCAAAAGTCCAGGTCGCTTCTCAGGATTTGTGGCACCTTCTGACTGTCAAACTGT
TCTTGTCAATCTCACAGGCTCCTGGTTGTCTACCCATGGACCCAGAGGTTCTTTGACAGCTTTGGCAACCTGTCCTC
TGCCTCTGCCATCATGGGCAACCCCAAAGTCAAGGCACATGGCAAGAAGGTGCTGACTTCCTTGGGAGATGCCATAA
AGCACCTGGATGATCTCAAGGGCACCTTTGCCCAGCTGAGTGAACTGCACTGTGACAAGCTGCATGTGGATCCTGAG
AACTTCAAGGTGAGTCCAGGAGATGTTTCAGCACTGTTGCCTTTAGTCTCGAGGCAACTTAGACAACTGAGTATTGA
TCTGAGCACAGCAGGGTGTGAGCTGTTTGAAGATACTGGGGTTGGGAGTGAAGAAACTGCAGAGGACTAACTGGGCT
GAGACCCAGTGGCAATGTTTTAGGGCCTAAGGAGTGCCTCTGAAAATCTAGATGGACAACTTTGACTTTGAGAAAAG
AGAGGTGGAAATGAGGAAAATGACTTTTCTTTATTAGATTTCGGTAGAAAGAACTTTCACCTTTCCCCTATTTTTGT
TATTCGTTTTAAAACATCTATCTGGAGGCAGGACAAGTATGGTCGTTAAAAAGATGCAGGCAGAAGGCATATATTGG
CTCAGTCAAAGTGGGGAACTTTGGTGGCCAAACATACATTGCTAAGGCTATTCCTATATCAGCTGGACACATATAAA
ATGCTGCTAATGCTTCATTACAAACTTATATCCTTTAATTCCAGATGGGGGCAAAGTATGTCCAGGGGTGAGGAACA
ATTGAAACATTTGGGCTGGAGTAGATTTTGAAAGTCAGCTCTGTGTGTGTGTGTGTGTGTGTGCGCGCGTGTGTTTG
TGTGTGTGTGAGAGCGTGTGTTTCTTTTAACGTTTTCAGCCTACAGCATACAGGGTTCATGGTGGCAAGAAGATAAC
AAGATTTAAATTATGGCCAGTGACTAGTGCTGCAAGAAGAACAACTACCTGCATTTAATGGGAAAGCAAAATCTCAG
GCTTTGAGGGAAGTTAACATAGGCTTGATTCTGGGTGGAAGCTTGGTGTGTAGTTATCTGGAGGCCAGGCTGGAGCT
CTCAGCTCACTATGGGTTCATCTTTATTGTCTCCTTTCATCTCAACAGCTCCTGGGAAATGTGCTGGTGACCGTTTT
GGCAATCCATTTCGGCAAAGAATTCACCCCTGAGGTGCAGGCTTCCTGGCAGAAGATGGTGACTGGAGTGGCCAGTG
CCCTGTCCTCCAGATACCACTGAGCTCACTGCCCATGATGCAGAGCTTTCAAGGATAGGCTTTATTCTGCAAGCAAT
ACAAATAATAAATCTATTCTGCTAAGAGATCACACATGGTTGTCTTCAGTTCTTTTTTTTATGTCTTTTTAAATATA
TGAGCCACAAAGGGTTTTATGTTGAGGGATGTGTTTATGTGTATTTATACATGGCTATGTGTGTTTGTGTCATGTGC
ACACTCCACACTTTTTTGTTTACGTTAGATGTGGGTTTTGATGAGCAAATAAAAGAACTAGGCAATAAAGAAACTTA
TACATGGGAGCGTCTGCAAGTGGGAGTAAAAGGTGCAGGAGAAATCTGGTTGGAAGAAAGACCTCTATAGGACAGGA
CTCCTCAGAAACAGATGTTTTGGAAGAGATGGGGAAAGGTTCAGTGAAGGGGGCTGAACCCCCTTCCCTGGATTGCA
GCACAGCAGCGAGGAAGGGGCTCAACGAAGAAAAAGTGTTCCAAGCTTTAGGAAGTCAAGGTTTAGGCAGGGATAGC
CATTCTATTTTATTAGGGGCAATACTATTTCCAACGGCATCTGGCTTTTCTCAGCCCTTGTGAGGCTCTACGGGGAG
GTTGAGGTGTTAGAGATCAGAGCAGGAAACAGGTTTTTCTTTCCACGGTAACTACAATGAAGTGATCCTTACTTTAC
TAAGGAACTTTTTCATTTTAAGTGTTGACGCATGCCTAAAGAGGTGAAATTAATCCCATACCCTTAAGTCTACAGAC
TGGTCACAGCATTTCAAGGAGGAGACCTCATTGTAAGCTTCTAGGGAGGTGGGGACCTAGGTGAAGGAAATGAGCCA
GCAGAAGCTCACAAGTCAGCATCAGCGTGTCATGTCTCAGCAGCAGAACAGCACGGTCAGATGAAAATATAGTGTGA
AGAATTTGTATAACATTAATTGAGAAGGCAGATTCACTGGAGTTCTTATATAATTGAAAGTTAATGCACGTTAATAA
GCAAGAGTTTAGTTTAATGTGATGGTGTTATGAACTTAACGCTTGTGTCTCCAGAAAATTCACATGCTGAATCCCCA
ACTCCCAATTGGCTCCATTTGTGGGGGAGGCTTTGGAAAAGTAATCAGGTTTAGAGGAGCTCATGAGAGCAGATCCC
CATCATAGAATTATTTTCCTCATCAGAAGCAGAGAGATTAGCCATTTCTCTTCCTTCTGGTGAGGACACAGTGGGAA
GTCAGCCACCTGCAACCCAGGAAGAGAGCCCTGACCAGGAACCAGCAGAAAAGTGAGAAAAAATCCTGTTGTTGAAG
TCACCCAGTCTATGCTATTTTGTTATAGCACCTTGCACTAAGTAAGGCAGATGAAGAAAGAGAAAAAAATAAGCTTC
GGTGTTCAGTGGATTAGAAACCATGTTTATCTCAGGTTTACAAATCTCCACTTGTCCTCTGTGTTTCAGAATAAAAT
ACCAACTCTACTACTCTCATCTGTAAGATGCAAATAGTAAGCCTGATCCCTTCTGTCTAACTTCGAATTCTATTTTT
TCTTCAACGTACTTTAGGCTTGTAATGTGTTTATATACAGTGAAATGTCAAGTTCTTTCTTTATATTTCTTTCTTTC
TTTTTTTTCCTCAGCCTCAGAGTTTTCCACATGCCCTTCCTACCTTCAGGAACTTCTTTCTCCAAACGTCTTCTGCC
TGGCCTCCATTCAAATCATAAAGGACCCACTTCAAATGCCATCACTCACTACCATTTCACAATTCGCACTTTCTTTC
TTTGTCCTTTTTTTTTTTAGTAAAACAAGTTTATAAAAAATTGAAGGAATAAATGAATGGCTACTTCATAGGCAGAG
TAGACACAAGGGCTACTGGTTGCCGATTTTTATTGTTATTTTTCAATAGTATGCTAAACAAGGGGTAGATTATTTAT
GCTGCCCATTTTTAGACCATAAAAGATAACTTCCTGATGTTGCCATGGCATTTTTTTTCCTTTTAATTTTATTTCAT
TTCATTTTAATTTCGAAGGTACATGTGCAGGATGTGCAGGCTTGTTACATGGGTAAATGTGTGTCTTTCTGGCCTTT
TAGCCATCTGTATCAATGAGCAGATATAAGCTTTACACAGGATCATGAAGGATGAAAGAATTTCACCAATATTATAA
TAATTTCAATCAACCTGATAGCTTAGGGGATAAACTAATTTGAAGATACAGCTTGCCTCCGATAAGCCAGAATTCCA
GAGCTTCTGGCATTATAATCTAGCAAGGTTAGAGATCATGGATCACTTTCAGAGAAAAACAAAAACAAACTAACCAA
AAGCAAAACAGAACCAAAAAACCTCCATAAATACTTCCTACCCAGTTAATGGTCCAATATGTCAGAAACAGCACTGT
GTTAGAAATAAAGCTGTCTAAAGTACACTAATATTCGAGTTATAATAGTGTGTGGACTATTAGTCAATAAAAACAAC
CCTTGCCTCTTTAGAGTTGTTTTCCATGTACACGCACATCTTATGTCTTAGAGTAAGATTCCCTGAGAAGTGAACCT
AGCATTTATACAAGATAATTAATTCTAATCCACAGTACCTGCCAAAGAACATTCTACCATCATCTTTACTGAGCATA
GAAGAGCTACGCCAAAACCCTGGGTCATCAGCCAGCACACACACTTATCCAGTGGTAAATACACATCATCTGGTGTA
TACATACATACCTGAATATGGAATCAAATATTTTTCTAAGATGAAACAGTCATGATTTATTTCAAATAGGTACGGAT
AAGTAGATATTGAGGTAAGCATTAGGTCTTATATTATGTAACACTAATCTATTACTGCGCTGAAACTGTGGTCTTTA
TGAAAATTGTTTTCACTACACTATTGAGAAATTAAGAGATAATGGCAAAAGTCACAAAGAGTATATTCAAAAAGAAG
TATAGCACTTTTTCCTTAGAAACCACTGCTAACTGAAAGAGACTAAGATTTGTCCCGTCAAAAATCCTGGACCTATG
CCTAAAACACATTTCACAATCCCTGAACTTTTCAAAAATTGGTACATGCTTTAGCTTTAAACTACAGGCCTCACTGG
AGCTACAGACAAGAAGGTAAAAAACGGCTGACAAAAGAAGTCCTGGTATCCTCTATGATGGGAGAAGGAAACTAGCT
AAAGGGAAGAATAAATTAGAGAAAAACTGGAATGACTGAATCGGAACAAGGCAAAGGCTATAAAAAAAATTAAGCAG
CAGTATCCTCTTGGGGGCCCCTTCCCCACACTATCTCAATGCAAATATCTGTCTGAAACGGTCCCTGGCTAAACTCC
ACCCATGGGTTGGCCAGCCTTGCCTTGACCAATAGCCTTGACAAGGCAAACTTGACCAATAGTCTTAGAGTATCCAG
TGAGGCCAGGGGCCGGCGGCTGGCTAGGGATGAAGAATAAAAGGAAGCACCCTTCAGCAGTTCCACACACTCGCTTC
TGGAACGTCTGAGATTATCAATAAGCTCCTAGTCCAGACGCCATGGGTCATTTCACAGAGGAGGACAAGGCTACTAT
CACAAGCCTGTGGGGCAAGGTGAATGTGGAAGATGCTGGAGGAGAAACCCTGGGAAGGTAGGCTCTGGTGACCAGGA
CAAGGGAGGGAAGGAAGGACCCTGTGCCTGGCAAAAGTCCAGGTCGCTTCTCAGGATTTGTGGCACCTTCTGACTGT
CAAACTGTTCTTGTCAATCTCACAGGCTCCTGGTTGTCTACCCATGGACCCAGAGGTTCTTTGACAGCTTTGGCAAC
CTGTCCTCTGCCTCTGCCATCATGGGCAACCCCAAAGTCAAGGCACATGGCAAGAAGGTGCTGACTTCCTTGGGAGA
TGCCATAAAGCACCTGGATGATCTCAAGGGCACCTTTGCCCAGCTGAGTGAACTGCACTGTGACAAGCTGCATGTGG
ATCCTGAGAACTTCAAGGTGAGTCCAGGAGATGTTTCAGCACTGTTGCCTTTAGTCTCGAGGCAACTTAGACAACTG
AGTATTGATCTGAGCACAGCAGGGTGTGAGCTGTTTGAAGATACTGGGGTTGGGAGTGAAGAAACTGCAGAGGACTA
ACTGGGCTGAGACCCAGTGGCAATGTTTTAGGGCCTAAGGAGTGCCTCTGAAAATCTAGATGGACAACTTTGACTTT
GAGAAAAGAGAGGTGGAAATGAGGAAAATGACTTTTCTTTATTAGATTTCGGTAGAAAGAACTTTCACCTTTCCCCT
ATTTTTGTTATTCGTTTTAAAACATCTATCTGGAGGCAGGACAAGTATGGTCGTTAAAAAGATGCAGGCAGAAGGCA
TATATTGGCTCAGTCAAAGTGGGGAACTTTGGTGGCCAAACATACATTGCTAAGGCTATTCCTATATCAGCTGGACA
CATATAAAATGCTGCTAATGCTTCATTACAAACTTATATCCTTTAATTCCAGATGGGGGCAAAGTATGTCCAGGGGT
GAGGAACAATTGAAACATTTGGGCTGGAGTAGATTTTGAAAGTCAGCTCTGTGTGTGTGTGTGTGTGTGTGTGTGTC
AGCGTGTGTTTCTTTTAACGTCTTCAGCCTACAACATACAGGGTTCATGGTGGGAAGAAGATAGCAAGATTTAAATT
ATGGCCAGTGACTAGTGCTTGAAGGGGAACAACTACCTGCATTTAATGGGAAGGCAAAATCTCAGGCTTTGAGGGAA
GTTAACATAGGCTTGATTCTGGGTGGAAGCTGGGTGTGTAGTTATCTGGAGGCCAGGCTGGAGCTCTCAGCTCACTA
TGGGTTCATCTTTATTGTCTCCTTTCATCTCAACAGCTCCTGGGAAATGTGCTGGTGACCGTTTTGGCAATCCATTT
CGGCAAAGAATTCACCCCTGAGGTGCAGGCTTCCTGGCAGAAGATGGTGACTGCAGTGGCCAGTGCCCTGTCCTCCA
GATACCACTGAGCCTCTTGCCCATGATTCAGAGCTTTCAAGGATAGGCTTTATTCTGCAAGCAATACAAATAATAAA
TCTATTCTGCTGAGAGATCACACATGATTTTCTTCAGCTCTTTTTTTTACATCTTTTTAAATATATGAGCCACAAAG
GGTTTATATTGAGGGAAGTGTGTATGTGTATTTCTGCATGCCTGTTTGTGTTTGTGGTGTGTGCATGCTCCTCATTT
ATTTTTATATGAGATGTGCATTTTGATGAGCAAATAAAAGCAGTAAAGACACTTGTACACGGGAGTTCTGCAAGTGG
GAGTAAATGGTGTTGGAGAAATCCGGTGGGAAGAAAGACCTCTATAGGACAGGACTTCTCAGAAACAGATGTTTTGG
AAGAGATGGGAAAAGGTTCAGTGAAGACCTGGGGGCTGGATTGATTGCAGCTGAGTAGCAAGGATGGTTCTTAATGA
AGGGAAAGTGTTCCAAGCTTTAGGAATTCAAGGTTTAGTCAGGTGTAGCAATTCTATTTTATTAGGAGGAATACTAT
TTCTAATGGCACTTAGCTTTTCACAGCCCTTGTGGATGCCTAAGAAAGTGAAATTAATCCCATGCCCTCAAGTGTGC
AGATTGGTCACAGCATTTCAAGGGAGAGACCTCATTGTAAGACTCTGGGGGAGGTGGGGACTTAGGTGTAAGAAATG
AATCAGCAGAGGCTCACAAGTCAGCATGAGCATGTTATGTCTGAGAAACAGACCAGCACTGTGAGATCAAAATGTAG
TGGGAAGAATTTGTACAACATTAATTGGAAGGTTTACTTAATGGAATTTTTGTATAGTTGGATGTTAGTGCATCTCT
ATAAGTAAGAGTTTAATATGATGGTGTTACGGACCTGGTGTTTGTGTCTCCTCAAAATTCACATGCTGAATCCCCAA
CTCCCAACTGACCTTATCTGTGGGGGAGGCTTTTGAAAAGTAATTAGGTTTAGCTGAGCTCATAAGAGCAGATCCCC
ATCATAAAATTATTTTCCTTATCAGAAGCAGAGAGACAAGCCATTTCTCTTTCCTCCCGGTGAGGACACAGTGAGAA
GTCCGCCATCTGCAATCCAGGAAGAGAACCCTGACCACGAGTCAGCCTTCAGAAATGTGAGAAAAAACTCTGTTGTT
GAAGCCACCCAGTCTTTTGTATTTTGTTATAGCACCTTACACTGAGTAAGGCAGATGAAGAAGGAGAAAAAAATAAG
CTTGGGTTTTGAGTGAACTACAGACCATGTTATCTCAGGTTTGCAAAGCTCCCCTCGTCCCCTATGTTTCAGCATAA
AATACCTACTCTACTACTCTCATCTATAAGACCCAAATAATAAGCCTGCGCCCTTCTCTCTAACTTTGATTTCTCCT
ATTTTTACTTCAACATGCTTTACTCTAGCCTTGTAATGTCTTTACATACAGTGAAATGTAAAGTTCTTTATTCTTTT
TTTCTTTCTTTCTTTTTTCTCCTCAGCCTCAGAATTTGGCACATGCCCTTCCTTCTTTCAGGAACTTCTCCAACATC
TCTGCCTGGCTCCATCATATCATAAAGGTCCCACTTCAAATGCAGTCACTACCGTTTCAGGATATGCACTTTCTTTC
TTTTTTGTTTTTTGTTTTTTTTAAGTCAAAGCAAATTTCTTGAGAGAGTAAAGAAATAAACGAATGACTACTGCATA
GGCAGAGCAGCCCCGAGGGCCGCTGGTTGTTCCTTTTATGGTTATTTCTTGATGATATGTTAAACAAGTTTTGGATT
ATTTATGCCTTCTCTTTTTAGGCCATATAGGGTAACTTTCTGACATTGCCATGGCATGTTTCTTTTAATTTAATTTA
CTGTTACCTTAAATTCAGGGGTACACGTACAGGATATGCAGGTTTGTTTTATAGGTAAAAGTGTGCCATGGTTTTAA
TGGGTTTTTTTTTTCTTGTAAAGTTGTTTAAGTTTCTTGTTTACTCTGGATATTGGCCTTTGTCAGAAGAATAGATT
GGAAAATCTTTTTCCCATTCTGTAGATTGTCTTTCGCTCTGATGGTAGTTTCTTTTGCTGAGCAGGAGCTCTTTAGT
TTAATTAGATTCCATTGGTCAATTTTTGCTTTTGCTGCAATTGCTTTTCACGCTTTCATCATGAAATCTGTGCCCGT
GTTTATATCATGAATAGTATTGCCTTGATTTTTTTCTAGGCTTTTTATAGTTTGGGGTTTTTCATTTAAGTCTCTAA
TCCATCCGGAGTTAATTTTGGATAAGGTATAAGGAAGGAGTCCAGTTTCATTTTTCAGCATATGGCTAGCCAGTTCT
CCCCCATCATTTATTAAATTGAAAATCCTTTCCCCATTGCTTGCTTTTGTCAGGTTTCTAAAAGACAGATGGTTGTA
GGTACAATATGCAGTTTCTTCAAGTCATATAATACCATCTGAAATCTCTTATTAATTCATTTCTTTTAGTATGTATG
CTGGTCTCCTCTGCTCACTATAGTGAGGGCACCATTAGCCAGAGAATCTGTCTGTCTAGTTCATGTAAGATTCTCAG
AATTAAGAAAAATGGATGGCATATGAATGAAACTTCATGGATGACATATGGAATCTAATGTGTATTTGTTGAATTAA
TGCATAAGATGCAACAAGGGAAAGGTTGACAACTGCAGTGATAACCTGGTATTGATGATATAAGAGTCTATAGATCA
CAGTAGAAGCAATAATCATGGAAAACAATTGGAAATGGGGAACAGCCACAAACAAGAAAGAATCAATACTACCAGGA
AAGTGACTGCAGGTCACTTTTCCTGGAGCGGGTGAGAGAAAAGTGGAAGTTGCAGTAACTGCCGAATTCCTGGTTGG
CTGATGGAAAGATGGGGCAACTGTTCACTGGTACGCAGGGTTTTAGATGTATGTACCTAAGGATATGAGGTATGGCA
ATGAACAGAAATTCTTTTGGGAATGAGTTTTAGGGCCATTAAAGGACATGACCTGAAGTTTCCTCTGAGGCCAGTCC
CCACAACTCAATATAAATGTGTTTCCTGCATATAGTCAAAGTTGCCACTTCTTTTTCTTCATATCATCGATCTCTGC
TCTTAAAGATAATCTTGGTTTTGCCTCAAACTGTTTGTCACTACAAACTTTCCCCATGTTCCTAAGTAAAACAGGTA
ACTGCCTCTCAACTATATCAAGTAGACTAAAATATTGTGTCTCTAATATCAGAAATTCAGCTTTAATATATTGGGTT
TAACTCTTTGAAATTTAGAGTCTCCTTGAAATACACATGGGGGTGATTTCCTAAACTTTATTTCTTGTAAGGATTTA
TCTCAGGGGTAACACACAAACCAGCATCCTGAACCTCTAAGTATGAGGACAGTAAGCCTTAAGAATATAAAATAAAC
TGTTCTTCTCTCTGCCGGTGGAAGTGTGCCCTGTCTATTCCTGAAATTGCTTGTTTGAGACGCATGAGACGTGCAGC
ACATGAGACACGTGCAGCAGCCTGTGGAATATTGTCAGTGAAGAATGTCTTTGCCTGATTAGATATAAAGACAAGTT
AAACACAGCATTAGACTATAGATCAAGCCTGTGCCAGACACAAATGACCTAATGCCCAGCACGGGCCACGGAATCTC
CTATCCTCTTGCTTGAACAGAGCAGCACACTTCTCCCCCAACACTATTAGATGTTCTGGCATAATTTTGTAGATATG
TAGGATTTGACATGGACTATTGTTCAATGATTCAGAGGAAATCTCCTTTGTTCAGATAAGTACACTGACTACTAAAT
GGATTAAAAAACACAGTAATAAAACCCAGTTTTCCCCTTACTTCCCTAGTTTGTTTCTTATTCTGCTTTCTTCCAAG
TTGATGCTGGATAGAGGTGTTTATTTCTATTCTAAAAAGTGATGAAATTGGCCGGGCGCGGTGGCTCACACCTGTAA
TCCCAGCACTTTGGGAGGCTGAGGTGGGCGGATCACGAGGTCAGGAGATCAAGACCATCCTGGCTAACATGGTGAAA
CCCCATCTCTACTAAAAATACAAAAAATTAGCCAGAGACGGTGGCGGGTGCCTGTAGTCCCAGCTACTCGGGAGGCT
GAGGCAGGAGAATGGCGTGAACCTGGGAGGCAGAGCTGCAGTGAGCAGAGATCGCGCCACTGCACACTCCAGCCTGG
GTGACAAAGCGAGACTCCATCTCAAAAAAAAAAAAAAAAAAAAAAAGAAAGAAAGAAAGAAAAAAAAAGTGATGAAA
TTGTGTATTCAATGTAGTCTCAAGAGAATTGAAAACCAAGAAAGGCTGTGGCTTCTTCCACATAAAGCCTGGATGAA
TAACAGGATAACACGTTGTTACATTGTCACAACTCCTGATCCAGGAATTGATGGCTAAGATATTCGTAATTCTTATC
CTTTTCAGTTGTAACTTATTCCTATTTGTCAGCATTCAGGTTATTAGCGGCTGCTGGCGAAGTCCTTGAGAAATAAA
CTGCACACTGGATGGTGGGGGTAGTGTAGGAAAATGGAGGGGAAGGAAGTAAAGTTTCAAATTAAGCCTGAACAGCA
AAGTTCCCCTGAGAAGGCCACCTGGATTCTATCAGAAACTCGAATGTCCATCTTGCAAAACTTCCTTGCCCAAACCC
CACCCCTGGAGTCACAACCCACCCTTGACCAATAGATTCATTTCACTGAGGGAGGCAAAGGGCTGGTCAATAGATTC
ATTTCACTGGGAGAGGCAAAGGGCTGGGGGCCAGAGAGGAGAAGTAAAAAGCCACACATGAAGCAGCAATGCAGGCA
TGCTTCTGGCTCATCTGTGATCACCAGGAAACTCCCAGATCTGACACTGTAGTGCATTTCACTGCTGACAAGAAGGC
TGCTGCCACCAGCCTGTGAAGCAAGGTTAAGGTGAGAAGGCTGGAGGTGAGATTCTGGGCAGGTAGGTACTGGAAGC
CGGGACAAGGTGCAGAAAGGCAGAAAGTGTTTCTGAAAGAGGGATTAGCCCGTTGTCTTACATAGTCTGACTTTGCA
CCTGCTCTGTGATTATGACTATCCCACAGTCTCCTGGTTGTCTACCCATGGACCTAGAGGTACTTTGAAAGTTTTGG
ATATCTGGGCTCTGACTGTGCAATAATGGGCAACCCCAAAGTCAAGGCACATGGCAAGAAGGTGCTGATCTCCTTCG
GAAAAGCTGTTATGCTCACGGATGACCTCAAAGGCACCTTTGCTACACTGAGTGACCTGCACTGTAACAAGCTGCAC
GTGGACCCTGAGAACTTCCTGGTGAGTAGTAAGTACACTCACGCTTTCTTCTTTACCCTTAGATATTTGCACTATGG
GTACTTTTGAAAGCAGAGGTGGCTTTCTCTTGTGTTATGAGTCAGCTATGGGATATGATATTTCAGCAGTGGGATTT
TGAGAGTTATGTTGCTGTAAATAACATAACTAAAATTTGGTAGAGCAAGGACTATGAATAATGGAAGGCCACTTACC
ATTTGATAGCTCTGAAAAACACATCTTATAAAAAATTCTGGCCAAAATCAAACTGAGTGTTTTGGATGAGGGAACAG
AAGTTGAGATAGAGAAAATAACATCTTTCCTTTGGTCAGCGAAATTTTCTATAAAAATTAATAGTCACTTTTCTGCA
TAGTCCTGGAGGTTAGAAAAAGATCAACTGAACAAAGTAGTGGGAAGCTGTTAAAAGAGGATTGTTTCCCTCCGAAT
GATGATGGTATACTTTTGTACGCATGGTACAGGATTCTTTGTTATGAGTGTTTGGGAAAATTGTATGTATGTATGTA
TGTATGTGATGACTGGGGACTTATCCTATCCATTACTGTTCCTTGAAGTACTATTATCCTACTTTTTAAAAGGACGA
AGTCTCTAAAAAAAAAATGAAACAATCACAATATGTTGGGGTAGTGAGTTGGCATAGCAAGTAAGAGAAGGATAGGA
CACAATGGGAGGTGCAGGGCTGCCAGTCATATTGAAGCTGATATCTAGCCCATAATGGTGAGAGTTGCTCAAACTCT
GGTCAAAAAGGATGTAAGTGTTATATCTATTTACTGCAAGTCCAGCTTGAGGCCTTCTATTCACTATGTACCATTTT
CTTTTTTATCTTCACTCCCTCCCCAGCTCTTAGGCAACGTGATATTGATTGTTTTGGCAACCCACTTCAGCGAGGAT
TTTACCCTACAGATACAGGCTTCTTGGCAGTAACTAACAAATGCTGTGGTTAATGCTGTAGCCCACAAGACCACTGA
GTTCCCTGTCCACTATGTTTGTACCTATGTCCCAAAATCTCATCTCCTTTAGATGGGGGAGGTTGGGGAGAAGAGCA
GTATCCTGCCTGCTGATTCAGTTCCTGCATGATAAAAATAGAATAAAGAAATATGCTCTCTAAGAAATATCATTGTA
CTCTTTTTCTGTCTTTATATTTTACCCTGATTCAGCCAAAAGGACGCACTATTTCTGATGGAAATGAGAATGTTGGA
GAATGGGAGTTTAAGGACAGAGAAGATACTTTCTTGCAATCCTGCAAGAAAAGAGAGAACTCGTGGGTGGATTTAGT
GGGGTAGTTACTCCTAGGAAGGGGAAATCGTCTCTAGAATAAGACAATGTTTTTACAGAAAGGGAGGTCAATGGAGG
TACTCTTTGGAGGTGTAAGAGGATTGTTGGTAGTGTGTAGAGGTATGTTAGGACTCAAATTAGAAGTTCTGTATAGG
CTATTATTTGTATGAAACTCAGGATATAGCTCATTTGGTGACTGCAGTTCACTTCTACTTATTTTAAACAACATATT
TTTTATGATTTATAATGAAGTGGGGATGGGGCTTCCTAGAGACCAATCAAGGGCCAAACCTTGAACTTTCTCTTAAC
GTCTTCAATGGTATTAATAGAGAATTATCTCTAAGGCATGTGAACTGGCTGTCTTGGTTTTCATCTGTACTTCATCT
GCTACCTCTGTGACCTGAAACATATTTATAATTCCATTAAGCTGTGCATATGATAGATTTATCATATGTATTTTCCT
TAAAGGATTTTTGTAAGAACTAATTGAATTGATACCTGTAAAGTCTTTATCACACTACCCAATAAATAATAAATCTC
TTTGTTCAGCTCTCTGTTTCTATAAATATGTACAAGTTTTATTGTTTTTAGTGGTAGTGATTTTATTCTCTTTCTAT
ATATATACACACACATGTGTGCATTCATAAATATATACAATTTTTATGAATAAAAAATTATTAGCAATCAATATTGA
AAACCACTGATTTTTGTTTATGTGAGCAAACAGCAGATTAAAAGGCTGAGATTTAGGAAACAGCACGTTAAGTCAAG
TTGATAGAGGAGAATATGGACATTTAAAAGAGGCAGGATGATATAAAATTAGGGAAACTGGATGCAGAGACCAGATG
AAGTAAGAAAAATAGCTATCGTTTTGAGCAAAAATCACTGAAGTTTCTTGCATATGAGAGTGACATAATAAATAGGG
AAACGTAGAAAATTGATTCACATGTATATATATATATAGAACTGATTAGACAAAGTCTAACTTGGGTATAGTCAGAG
GAGCTTGCTGTAATTATATTGAGGTGATGGATAAAGAACTGAAGTTGATGGAAACAATGAAGTTAAGAAAAAAAATC
GAGTAAGAGACCATTGTGGCAGTGATTGCACAGAACTGGAAAACATTGTGAAACAGAGAGTCAGAGATGACAGCTAA
AATCCCTGTCTGTGAATGAAAAGAAGGAAATTTATTGACAGAACAGCAAATGCCTACAAGCCCCCTGTTTGGATCTG
GCAATGAACGTAGCCATTCTGTGGCAATCACTTCAAACTCCTGTACCCAAGACCCTTAGGAAGTATGTAGCACCCTC
AAACCTAAAACCTCAAAGAAAGAGGTTTTAGAAGATATAATACCCTTTCTTCTCCAGTTTCATTAATCCCAAAACCT
CTTTCTCAAAGTATTTCCTCTATGTGTCCACCCCAAAGAGCTCACCTCACCATATCTCTTGAGTGGGAGCACATAGA
TAGGCGGTGCTACCATCTAACAGCTTCTGAAATTCCTTTGTCATATTTTTGAGTCCCCACTAATAACCCACAAAGCA
GAATAAATACCAGTTGCTCATGTACAATAATCACTCAACTGCTGTCTTGTAGCATACATTAATTAAGCACATTCTTT
GAATAATTACTGTGTCCAAACAATCACACTTTAAAATCTCACACTTGTGCTATCCCTTGCCCTTCTGAATGTCACTC
TGTATTTTAAATGAAGAGATGAGGGTTGAATTTCCTGTGTTACTTATTGTTCATTTCTCGATGAGGAGTTTTCACAT
TCACCTTTACTGGAAAACACATAAGTACACATCTTACAGGAAAAATATACCAAACTGACATGTAGCATGAATGCTTG
TGCATGTAGTCATATAAAATCTTGTAGCAATGTAAACATTCTCTGATATACACATACAGATGTGTCTATATGTCTAC
ACAATTTCTTATGCTCCATGAACAAACATTCCATGCACACATAAGAACACACACTGTTACAGATGCATACTTGAGTG
CATTGACAAAATTACCCCAGTCAATCTAGAGAATTTGGATTTCTGCATTTGACTCTGTTAGCTTTGTACATGCTGTT
CATTTACTCTGGGTGATGTCTTTCCCTCATTTTGCCTTGTCTATCTTGTACTCATACTTTAAGTCCTAACTTATATG
TTATCTCAACTAAGAAGCTATTTTTTTTTAATTTTAACTGGGCTTAAAGCCCTGTCTATAAACTCTGCTACAATTAT
GGGCTCTTTCTTATAATATTTAGTGTTTTTCCTACTAATGTACTTAATCTGCTCATTGTATATTCCTACCACTAAAT
TTTAACCTCTTTTATGGTAGAGACATTGTCTTGTAAACTCTTATTTCCCTAGTATTTGGAGATGAAAAAAAAGATTA
AATTATCCAAAATTAGATCTCTCTTTTCTACATTATGAGTATTACACTATCCATAGGGAAGTTTGTTTGAGACCTAA
ACTGAGGAACCTTTGGTTCTAAAATGACTATGTGATATCTTAGTATTTATAGGTCATGAGGTTCCTTCCTCTGCCTC
TGCTATAGTTTGATTAGTCAGCAAGCATGTGTCATGCATTTATTCACATCAGAATTTCATACACTAATAAGACATAG
TATCAGAAGTCAGTTTATTAGTTATATCAGTTAGGGTCCATCAAGGAAAGGACAAACCATTATCAGTTACTCAACCT
AGAATTAAATACAGCTCTTAATAGTTAATTATCCTTGTATTGGAAGAGCTAAAATATCAAATAAAGGACAGTGCAGA
AATCTAGATGTTAGTAACATCAGAAAACCTCTTCCGCCATTAGGCCTAGAAGGGCAGAAGGAGAAAATGTTTATACC
ACCAGAGTCCAGAACCAGAGCCCATAACCAGAGGTCCACTGGATTCAGTGAGCTAGTGGGTGCTCCTTGGAGAGAGC
CAGAACTGTCTAATGGGGGCATCAAAGTATCAGCCATAAAAAACCATAAAAAAGACTGTCTGCTGTAGGAGATCCGT
TCAGAGAGAGAGAGAGACCAGAAATAATCTTGCTTATGCTTTCCCTCAGCCAGTGTTTACCATTGCAGAATGTACAT
GCGACTGAAAGGGTGAGGAAACCTGGGAAATGTCAGTTCCTCAAATACAGAGAACACTGAGGGAAGGATGAGAAATA
AATGTGAAAGCAGACATGAATGGTAATTGACAGAAGGAAACTAGGATGTGTCCAGTAAATGAATAATTACAGTGTGC
AGTGATTATTGCAATGATTAATGTATTGATAAGATAATATGAAAACACAGAATTCAAACAGCAGTGAACTGAGATTA
GAATTGTGGAGAGCACTGGCATTTAAGAATGTCACACTTAGAATGTGTCTCTAGGCATTGTTCTGTGCATATATCAT
CTCAATATTCATTATCTGAAAATTATGAATTAGGTACAAAGCTCAAATAATTTATTTTTTCAGGTTAGCAAGAACTT
TTTTTTTTTTTTTTTCTGAGATGGAGCATTGCTATGGTTGCCCAGGCTGGAGTGCAATGGCATGATCCAGGCTCACT
GCAACATCTGCCTCCCAGGTTCAAGCGATTCTCCTGCCTCAGCCTCCCAAGTAGCTGGCATTACAGGCATGTGCCAC
CACCATGCCTGGCTAATTTTCTATTTTTAGTAGATAGGGGGTTTCACCATGTTGGTCAGGCTGATCTCGAACTCCTA
ACATCAGGTGATCCACCCTCCTCGGCCTCTGAATGTACTGGGATCACAGGCGTGAGCCACCACACCCAGCCAAGAAT
GTGAATTTTGTAGAAGGATATAACCCATATTTCTCTGACCCTAGAGTCCTTAGTATACCTCCCATACCATGTGGCTC
ATCCTCCTTACATACATTTCCCATCTTTCACCCTACCTTTTCCTTTTTGTTTCAGCTTTTCACTGTGTGTCAAAATC
TAGAACCTTATCTCCTACCTGCTCTGAAACCAACAGCAAGTTGACTTCCATTCTAACCCACATTGGCATTACACTAA
TTAAAATCGATACTGAGTTCTAAAATCATCTGGGATTTTGGGGACTATGTCTTACTTCATACTTCCTTGAGATTTCA
CATTAAATGTTGGTGTTCATTAAAGGTCCTTCATTTAACTTTGTATTCATCACACTCTTGGATTCACAGTTATATCT
AAACTCTTATATATAGCCTGTATAATCCCAATTCCCAAGTCTGATTTCTAACCTCTGACCTCCAACCTCAGTGCCAA
ACCCATATATCAAACAATGTACTGGGCTTATTTATATAGATGTCCTATAGGCACCTCAGACTCAGCATGGGTATTTC
ACTTGTTATACTAAAACTGTTTCTCTTCCAGTGTTTTCCATTTTAGTCATTAGATAGCTACTTGCCCATTCACCAAG
GTCACAGATTAAAATCATTTCCCTACCTCTAATCAACAGTTCAATTCTGCTTCAATTTGTCCCTATCTATTAATCAC
CACTCTTACTGCCCAGTCAGGTCCTCATTGTTTCCTGAACAAGAGTAGATGCTATTCTTTCCACTTTAAGACCTTAT
CCTGGCTGGATGCGGTGGCTCAGGCTTGTAAACCCAGCACTTTGGGAGGCCGAGGCAGGCAGATCACTTGAGGTCAG
GAGTTCAAGACCAGCCTGACCAACATGGTGAAACCCCATCTCTACTAAAAATACAAAATCAGCCGGGCGTGTGGTGC
ATGCCTGCAGTCCCAGCTATTCAGGTGGCTGAGGCAGGAGAATTGCTTGAACCCAGGAGGCGGAGGTTGCGGTGAGC
CTAGATTGCACCATTGCACTCTAGCTTGGGCAATAGGGATGAAACTCCATCTCAGAAGAGAAAAGAAAAAAAGACCT
TATTCTGTTACACAAATCCTCTCAATGCAATCCATATAGAATAAACATGTAACCAGATCTCCCAATGTGTAAAATCA
TTTCAGGTAGAACAGAATTAAAGTGAAAAGCCAAGTCTTTGGAATTAACAGACAAAGTTCAAATAACAGTCCTCATG
GCCTTAAGAATTTACCTAACATTTTTTTTAGAATCAATTTTCTTATATATGAATTGGAAACATAATTCCTCCCTCAC
AAACACATTCTAAGATTTTAAGGAGATATTGATGAAGTACATCATCTGTCATTTTTAACAGTTAGTGGTAGTGATTC
ACACAGCACATTATGATCTGTTCTTGTATGTTCTGTTCCATTCTGTATTCTTGACCTGGTTGTATTCTTTCTGAGCT
CCAGATCCACATATCTAAGTACATCTTTTTGCATTTTACAAGAGTGCATACAATACAATGTATCCAAGACTGTATTT
CTGATTTTATCGTACCACTAAACTCACAAATGTGGCCCTATTCTTGTGTTCACGACTGACATCACCGTCATGGTCCA
AGTCTGATAATAGAAATGGCATTGTCACTTTCTTCCCTACTGCAACAGAAGCCCAGCTATTTGTCTCCCATTTTCTC
TACTTCTAAAATACATTTCTTCACTAAGTGAGAATAATCTTTTAAAGACACAAATCAAACCATGCCACCACCTTTCT
TGAATTATTCAATATCTTTCGTTGGCTTCCAGGTTACAGAAAAATAACTTGTAACAAAGTTTAAAGGTCATTCATGG
CTCCTCTCTACCCTATTTTATAACATTTCCCCTTGTGATCAGAATCTCAGGCACATCATCCATCTTTCTATATACAA
ATAAAGTCATATAGTTTGAACTCACCTCTGGTTACTTTTAATCAACCAAATGCTGTAAAATGCATTTGTATCGCTAC
GTGTTAAGCAGTAGTTGATTCTTTTCATTTCTTGTTAATATTCTATTCTTTGACTATACCGTAATTTATCAATTCTA
CTGTTGGTAAGCATTTAAGTGGCTACCGGTTTGAGGTTTTTATGATTATTGCTGTCATAAGCATTTCTATACATGTC
TTTGGATACACACATGCATGTGTTTCTGAATATCTAAAAATGTAATTGCTAGGTAATAGACTTATCAAGCATCCAGC
ATTTGTGGATACTATTAAAGGTTTTCCAAAGGGGTTATACTATTGTACAGTGTCACCAACAGAGTTTGAGTTTCTAT
TGATCCATATCACCACCAAAATTTGAACTGTCAGTCTTATCTCTTCTCTTGTCTCTTTTTTCCTCTTTTTTTTCCTT
CCCTTCCCCTCTCTTCGTTTCTTTTCTCTCCTCTTCTCTTCTTTCCTCTCTTCCCTTCCCTTTCTCTTTCTCTTCCC
TATCCCTTCTCCTCTCCTCTCCCCTCCTTTTTTCTCCTCTCCTCTCCATTATTTATTTTTCCTTCTTCTCCTCCATC
CCTTCCATCCTCTCTCTTCCCCTCTTCCTTCCTTCCTTTCTCCATTTCTTCCTCCTCTTTCCCTCAATCCTTCCTTT
TGGATATGCTCATGGGTGTGTATTTGTCTGCCATTGTGGCATTATTTGAATTCAGAAAAGAGTGAAAAACTACTGGG
ATCTTCATTCTGGGTCTAATTCCACATTTTTTTTTAAGAACACACTCTGTAAAAATGTTCTGTACTAGCATATTCCC
AGGAACTTCGTTAAATTTAATCTGGCTGAATATGGTAAATCTACTTTGCACTTTGCATTCTTTCTTTAGTCATACCA
TAATTTTAAACATTCAAAATATTTGTATATAATATTTGATTTTATCTGTCATTAAAATGTTAACCTTAAAATTCATG
TTTCCAGAACCTATTTCAATAACTGGTAAATAAACACTATTCATTTTTTAAATATTCTTTTAATGGATATTTATTTC
AATATAATAAAAAATTAGAGTTTTATTATAGGAAGAATTTACCAAAAGAAGGAGGAAGCAAGCAAGTTTAAACTGCA
GCAATAGTTGTCCATTCCAACCTCTCAAAATTCCCTTGGAGACAAAATCTCTAGAGGCAAAGAAGAACTTTATATTG
AGTCAACTTGTTAAAACATCTGCTTTTAGATAAGTTTTCTTAGTATAAAGTGACAGAAACAAATAAGTTAAACTCTA
AGATACATTCCACTATATTAGCCTAAAACACTTCTGCAAAAATGAAACTAGGAGGATATTTTTAGAAACAACTGCTG
AAAGAGATGCGGTGGGGAGATATGCAGAGGAGAACAGGGTTTCTGAGTCAAGACACACATGACAGAACAGCCAATCT
CAGGGCAAGTTAAGGGAATAGTGGAATGAAGGTTCATTTTTCATTCTCACAAACTAATGAAACCCTGCTTATCTTAA
ACCAACCTGCTCACTGGAGCAGGGAGGACAGGACCAGCATAAAAGGCAGGGCAGAGTCGACTGTTGCTTACACTTTC
TTCTGACATAACAGTGTTCACTAGCAACCTCAAACAGACACCATGGTGCATCTGACTCCTGAGGAGAAGACTGCTGT
CAATGCCCTGTGGGGCAAAGTGAACGTGGATGCAGTTGGTGGTGAGGCCCTGGGCAGGTTGGTATCAAGGTTATAAG
AGAGGCTCAAGGAGGCAAATGGAAACTGGGCATGTGTAGACAGAGAAGACTCTTGGGTTTCTGATAGGCACTGACTC
TCTGTCCCTTGGGCTGTTTTCCTACCCTCAGATTACTGGTGGTCTACCCTTGGACCCAGAGGTTCTTTGAGTCCTTT
GGGGATCTGTCCTCTCCTGATGCTGTTATGGGCAACCCTAAGGTGAAGGCTCATGGCAAGAAGGTGCTAGGTGCCTT
TAGTGATGGCCTGGCTCACCTGGACAACCTCAAGGGCACTTTTTCTCAGCTGAGTGAGCTGCACTGTGACAAGCTGC
ACGTGGATCCTGAGAACTTCAGGGTGAGTCCAGGAGATGCTTCACTTTTCTCTTTTTACTTTCTAATCTTACATTTT
GGTTCTTTTACCTACCTGCTCTTCTCCCACATTTTTGTCATTTTACTATATTTTATCATTTAATGCTTCTAAAATTT
TGTTAATTTTTTATTTAAATATTCTGCATTTTTTCCTTCCTCACAATCTTGCTATTTTAAATTATTTAATATCCTGT
CTTTCTCTCCCAACCCCCTCCCTTCATTTTTCCTTCTCTAACAACAACTCAAATTATGCATACCAGCTCTCACCTGC
TAATTCTGCACTTAGAATAATCCTTTTGTCTCTCCACATGGGTATGGGAGAGGCTCCAACTCAAAGATGAGAGGCAT
AGAATACTGTTTTAGAGGCTATAAATCATTTTACAATAAGGAATAATTGGAATTTTATAAATTCTGTAGTAAATGGA
ATGGAAAGGAAAGTGAATATTTGATTATGAAAGACTAGGCAGTTACACTGGAGGTGGGGCAGAAGTCGTTGCTAGGA
GACAGCCCATCATCACACTGATTAATCAATTAATTTGTATCTATTAATCTGTTTATAGTAATTAATTTGTATATGCT
ATATACACATACAAAATTAAAACTAATTTGGAATTAATTTGTATATAGTATTATACAGCATATATAGCATATATGTA
CATATATAGACTACATGCTAGTTAAGTACATAGAGGATGTGTGTGTATAGATATATGTTATATGTATGCATTCATAT
ATGTACTTATTTATGCTGATGGGAATAACCTGGGGATCAGTTTTGTCTAAGATTTGGGCAGAAAAAAATGGGTGTTG
GCTCAGTTTCTCAGAAGCCAGTCTTTATTTCTCTGTTAACCATATGCATGTATCTGCCTACCTCTTCTCCGCAGCTC
TTGGGCAATGTGCTGGTGTGTGTGCTGGCCCGCAACTTTGGCAAGGAATTCACCCCACAAATGCAGGCTGCCTATCA
GAAGGTGGTGGCTGGTGTGGCTAATGCCCTGGCTCACAAGTACCATTGAGATCCTGGACTGTTTCCTGATAACCATA
AGAAGACCCTATTTCCCTAGATTCTATTTTCTGAACTTGGGAACACAATGCCTACTTCAAGGGTATGGCTTCTGCCT
AATAAAGAATGTTCAGCTCAACTTCCTGATTAATTTCACTTATTTCATTTTTTTGTCCAGGTGTGTAAGAAGGTTCC
TGAGGCTCTACAGATAGGGAGCACTTGTTTATTTTACAAAGAGTACATGGGAAAAGAGAAAAGCAAGGGAACCGTAC
AAGGCATTAATGGGTGACACTTCTACCTCCAAAGAGCAGAAATTATCAAGAACTCTTGATACAAAGATAATACTGGC
ACTGCAGAGGTTCTAGGGAAGACCTCAACCCTAAGACATAGCCTCAAGGGTAATAGCTACGATTAAACTCCAACAAT
TACTGAGAAAATAATGTGCTCAATTAAAGGCATAATGATTACTCAAGACAATGTTATGTTGTCTTTCTTCCTCCTTC
CTTTGCCTGCACATTGTAGCCCATAATACTATACCCCATCAAGTGTTCCTGCTCCAAGAAATAGCTTCCTCCTCTTA
CTTGCCCCAGAACATCTCTGTAAAGAATTTCCTCTTATCTTCCCATATTTCAGTCAAGATTCATTGCTCACGTATTA
CTTGTGACCTCTCTTGACCCCAGCCACAATAAACTTCTCTATACTACCCAAAAAATCTTTCCAAACCCTCCCCGACA
CCATATTTTTATATTTTTCTTATTTATTTCATGCACACACACACACTCCGTGCTTTATAAGCAATTCTGCCTATTCT
CTACCTTCTTACAATGCCTACTGTGCCTCATATTAAATTCATCAATGGGCAGAAAGAAAATATTTATTCAAGAAAAC
AGTGAATGAATGAACGAATGAGTAAATGAGTAAATGAAGGAATGATTATTCCTTGCTTTAGAACTTCTGGAATTAGA
GGACAATATTAATAATACCATCGCACAGTGTTTCTTTGTTGTTAATGCTACAACATACAAAGAGGAAGCATGCAGTA
AACAACCGAACAGTTATTTCCTTTCTGATCATAGGAGTAATATTTTTTTCCTTGAGCACATTTTTGCCATAGGTAAA
ATTAGAAGGATTTTTAGAACTTTCTCAGTTGTATACATTTTTAAAAATCTGTATTATATGCATGTTGATTAATTTTA
AACTTACTTGAATACCTAAACAGAATCTGTTGTTTCCTTGTGTTTGAAAGTGCTTTCACAGTAACTCTGTCTGTACT
GCCAGAATATACTGACAATGTGTTATAGTTAACTGTTTTGATCACAACATTTTGAATTGACTGGCAGCAGAAGCTCT
TTTTATATCCATGTGTTTTCCTTAAGTCATTATACATAGTAGGCATGAGACTCTTTATACTGAATAAGATATTTAGG
AACCACTGGTTTACATATCAGAAGCAGAGCTACTCAGGGCATTTTGGGGAAGATCACTTTCACATTCCTGAGCATAG
GGAAGTTCTCATAAGAGTAAGATATTAAAAGGAGATACTTGTGTGGTATTCGAAAGACAGTAAGAGAGATTGTAGAC
CTTATGATCTTGATAGGGAAAACAAACTACATTCCTTTCTCCAAAAGTCAAAAAAAAAGAGCAAATATAGCTTACTA
TACCTTCTATTCCTACACCATTAGAAGTAGTCAGTGAGTCTAGGCAAGATGTTGGCCCTAAAAATCCAAATACCAGA
GAATTCATGAGAACATCACCTGGATGGGACATGTGCCGAGCAACACAATTACTATATGCTAGGCATTGCTATCTTCA
TATTGAAGATGAGGAGGTCAAGAGATGAAAAAAGACTTGGCACCTTGTTGTTATATTAAAATTATTTGTTAGAGTAG
AGCTTTTGTAAGAGTCTAGGAGTGTGGGAGCTAAATGATGATACACATGGACACAAAGAATAGATCAACAGACACCC
AGGCCTACTTGAGGGTTGAGGGTGGGAAGAGGGAGACGATGAAAAAGAACCTATTGGGTATTAAGTTCATCACTGAG
TGATGAAATAATCTGTACATCAAGACCCAGTGATATGCAATTTACCTATATAACTTGTACATGTACCCCCAAATTTA
AAATAAAGTTAAAACAAAGTATAGGAATGGAATTAATTCCTCAAGATTTGGCTTTAATTTTATTTGATAATTTATCA
AATGGTTGTTTTTCTTTTCTCACTATGGCGTTGCTTTATAAACTATGTTCAGTATGTCTGAATGAAAGGGTGTGTGT
GTGTGTGAAAGAGAGGGAGAGAGGAAGGGAAGAGAGGACGTAATAATGTGAATTTGAGTTCATGAAAATTTTTCAAT
AAAATAATTTAATGTCAGGAGAATTAAGCCTAATAGTCTCCTAAATCATCCATCTCTTGAGCTTCAGAGCAGTCCTC
TGAATTAATGCCTACATGTTTGTAAAGGGTGTTCAGACTGAAGCCAAGATTCTACCTCTAAAGAGATGCAATCTCAA
ATTTATCTGAAGACTGTACCTCTGCTCTCCATAAATTGACACCATGGCCCACTTAATGAGGTTAAAAAAAAGCTAAT
TCTGAATGAAAATCTGAGCCCAGTGGAGGAAATATTAATGAACAAGGTGCAGACTGAAATATAAATTTTCTGTAATA
ATTATGCATATACTTTAGCAAAGTTCTGTCTATGTTGACTTTATTGCTTTTGGTAAGAAATACAACTTTTTAAAGTG
AACTAAACTATCCTATTTCCAAACTATTTTGTGTGTGTGCGGTTTGTTTCTATGGGTTCTGGTTTTCTTGGAGCATT
TTTATTTCATTTTAATTAATTAATTCTGAGAGCTGCTGAGTTGTGTTTACTGAGAGATTGTGTATCTGCGAGAGAAG
TCTGTAGCAAGTAGCTAGACTGTGCTTGACCTAGGAACATATACAGTAGATTGCTAAAATGTCTCACTTGGGGAATT
TTAGACTAAACAGTAGAGCATGTATAAAAATACTCTAGTCAAGTGCTGCTTTTGAAACAAATGATAAAACCACACTC
CCATAGATGAGTGTCATGATTTTCATGGAGGAAGTTAATATTCATCCTCTAAGTATACCCAGACTAGGGCCATTCTG
ATATAAAACATTAGGACTTAAGAAAGATTAATAGACTGGAGTAAAGGAAATGGACCTCTGTCTCTCTCGCTGTCTCT
TTTTTGAGGACTTGTGTGTGTGTGTGTGTGTGTGTGTGTGTGTGTTGTGGTCAGTGGGGCTGGAATAAAAGTAGAAT
AGACCTGCACCTGCTGTGGCATCCATTCACAGAGTAGAAGCAAGCTCACAATAGTGAAGATGTCAGTAAGCTTGAAT
AGTTTTTCAGGAACTTTGAATGCTGATTTAGATTTGAAACTGAGGCTCTGACCATAACCAAATTTGCACTATTTATT
GCTTCTTGAAACTTATTTGCCTGGTATGCCTGGGCTTTTGATGGTCTTAGTATAGCTTGCAGCCTTGTCCCTGCAGG
GTATTATGGGTAATAGAAAGAAAAGTCTGCGTTACACTCTAGTCACACTAAGTAACTACCATTGGAAAAGCAACCCC
TGCCTTGAAGCCAGGATGATGGTATCTGCAGCAGTTGCCAACACAAGAGAAGGATCCATAGTTCATCATTTAAAAAA
GAAAACAAAATAGAAAAAGGAAAACTATTTCTGAGCATAAGAAGTTGTAGGGTAAGTCTTTAAGAAGGTGACAATTT
CTGCCAATCAGGATTTCAAAGCTCTTGCTTTGACAATTTTGGTCTTTCAGAATACTATAAATATAACCTATATTATA
ATTTCATAAAGTCTGTGCATTTTCTTTGACCCAGGATATTTGCAAAAGACATATTCAAACTTCCGCAGAACACTTTA
TTTCACATATACATGCCTCTTATATCAGGGATGTGAAACAGGGTCTTGAAAACTGTCTAAATCTAAAACAATGCTAA
TGCAGGTTTAAATTTAATAAAATAAAATCCAAAATCTAACAGCCAAGTCAAATCTGTATGTTTTAACATTTAAAATA
TTTTAAAGACGTCTTTTCCCAGGATTCAACATGTGAAATCTTTTCTCAGGGATACACGTGTGCCTAGATCCTCATTG
CTTTAGTTTTTTACAGAGGAATGAATATAAAAAGAAAATACTTAAATTTTATCCCTCTTACCTCTATAATCATACAT
AGGCATAATTTTTTAACCTAGGCTCCAGATAGCCATAGAAGAACCAAACACTTTCTGCGTGTGTGAGAATAATCAGA
GTGAGATTTTTTCACAAGTACCTGATGAGGGTTGAGACAGGTAGAAAAAGTGAGAGATCTCTATTTATTTAGCAATA
ATAGAGAAAGCATTTAAGAGAATAAAGCAATGGAAATAAGAAATTTGTAAATTTCCTTCTGATAACTAGAAATAGAG
GATCCAGTTTCTTTTGGTTAACCTAAATTTTATTTCATTTTATTGTTTTATTTTATTTTATTTTATTTTATTTTGTG
TAATCGTAGTTTCAGAGTGTTAGAGCTGAAAGGAAGAAGTAGGAGAAACATGCAAAGTAAAAGTATAACACTTTCCT
TACTAAACCGACTGGGTTTCCAGGTAGGGGCAGGATTCAGGATGACTGACAGGGCCCTTAGGGAACACTGAGACCCT
ACGCTGACCTCATAAATGCTTGCTACCTTTGCTGTTTTAATTACATCTTTTAATAGCAGGAAGCAGAACTCTGCACT
TCAAAAGTTTTTCCTCACCTGAGGAGTTAATTTAGTACAAGGGGAAAAAGTACAGGGGGATGGGAGAAAGGCGATCA
CGTTGGGAAGCTATAGAGAAAGAAGAGTAAATTTTAGTAAAGGAGGTTTAAACAAACAAAATATAAAGAGAAATAGG
AACTTGAATCAAGGAAATGATTTTAAAACGCAGTATTCTTAGTGGACTAGAGGAAAAAAATAATCTGAGCCAAGTAG
AAGACCTTTTCCCCTCCTACCCCTACTTTCTAAGTCACAGAGGCTTTTTGTTCCCCCAGACACTCTTGCAGATTAGT
CCAGGCAGAAACAGTTAGATGTCCCCAGTTAACCTCCTATTTGACACCACTGATTACCCCATTGATAGTCACACTTT
GGGTTGTAAGTGACTTTTTATTTATTTGTATTTTTGACTGCATTAAGAGGTCTCTAGTTTTTTATCTCTTGTTTCCC
AAAACCTAATAAGTAACTAATGCACAGAGCACATTGATTTGTATTTATTCTATTTTTAGACATAATTTATTAGCATG
CATGAGCAAATTAAGAAAAACAACAACAAATGAATGCATATATATGTATATGTATGTGTGTATATATACACATATAT
ATATATATTTTTTTTCTTTTCTTACCAGAAGGTTTTAATCCAAATAAGGAGAAGATATGCTTAGAACTGAGGTAGAG
TTTTCATCCATTCTGTCCTGTAAGTATTTTGCATATTCTGGAGACGCAGGAAGAGATCCATCTACATATCCCAAAGC
TGAATTATGGTAGACAAAGCTCTTCCACTTTTAGTGCATCAATTTCTTATTTGTGTAATAAGAAAATTGGGAAAACG
ATCTTCAATATGCTTACCAAGCTGTGATTCCAAATATTACGTAAATACACTTGCAAAGGAGGATGTTTTTAGTAGCA
ATTTGTACTGATGGTATGGGGCCAAGAGATATATCTTAGAGGGAGGGCTGAGGGTTTGAAGTCCAACTCCTAAGCCA
GTGCCAGAAGAGCCAAGGACAGGTACGGCTGTCATCACTTAGACCTCACCCTGTGGAGCCACACCCTAGGGTTGGCC
AATCTACTCCCAGGAGCAGGGAGGGCAGGAGCCAGGGCTGGGCATAAAAGTCAGGGCAGAGCCATCTATTGCTTACA
TTTGCTTCTGACACAACTGTGTTCACTAGCAACCTCAAACAGACACCATGGTGCACCTGACTCCTGAGGAGAAGTCT
GCCGTTACTGCCCTGTGGGGCAAGGTGAACGTGGATGAAGTTGGTGGTGAGGCCCTGGGCAGGTTGGTATCAAGGTT
ACAAGACAGGTTTAAGGAGACCAATAGAAACTGGGCATGTGGAGACAGAGAAGACTCTTGGGTTTCTGATAGGCACT
GACTCTCTCTGCCTATTGGTCTATTTTCCCACCCTTAGGCTGCTGGTGGTCTACCCTTGGACCCAGAGGTTCTTTGA
GTCCTTTGGGGATCTGTCCACTCCTGATGCTGTTATGGGCAACCCTAAGGTGAAGGCTCATGGCAAGAAAGTGCTCG
GTGCCTTTAGTGATGGCCTGGCTCACCTGGACAACCTCAAGGGCACCTTTGCCACACTGAGTGAGCTGCACTGTGAC
AAGCTGCACGTGGATCCTGAGAACTTCAGGGTGAGTCTATGGGACCCTTGATGTTTTCTTTCCCCTTCTTTTCTATG
GTTAAGTTCATGTCATAGGAAGGGGAGAAGTAACAGGGTACAGTTTAGAATGGGAAACAGACGAATGATTGCATCAG
TGTGGAAGTCTCAGGATCGTTTTAGTTTCTTTTATTTGCTGTTCATAACAATTGTTTTCTTTTGTTTAATTCTTGCT
TTCTTTTTTTTTCTTCTCCGCAATTTTTACTATTATACTTAATGCCTTAACATTGTGTATAACAAAAGGAAATATCT
CTGAGATACATTAAGTAACTTAAAAAAAAACTTTACACAGTCTGCCTAGTACATTACTATTTGGAATATATGTGTGC
TTATTTGCATATTCATAATCTCCCTACTTTATTTTCTTTTATTTTTAATTGATACATAATCATTATACATATTTATG
GGTTAAAGTGTAATGTTTTAATATGTGTACACATATTGACCAAATCAGGGTAATTTTGCATTTGTAATTTTAAAAAA
TGCTTTCTTCTTTTAATATACTTTTTTGTTTATCTTATTTCTAATACTTTCCCTAATCTCTTTCTTTCAGGGCAATA
ATGATACAATGTATCATGCCTCTTTGCACCATTCTAAAGAATAACAGTGATAATTTCTGGGTTAAGGCAATAGCAAT
ATTTCTGCATATAAATATTTCTGCATATAAATTGTAACTGATGTAAGAGGTTTCATATTGCTAATAGCAGCTACAAT
CCAGCTACCATTCTGCTTTTATTTTATGGTTGGGATAAGGCTGGATTATTCTGAGTCCAAGCTAGGCCCTTTTGCTA
ATCATGTTCATACCTCTTATCTTCCTCCCACAGCTCCTGGGCAACGTGCTGGTCTGTGTGCTGGCCCATCACTTTGG
CAAAGAATTCACCCCACCAGTGCAGGCTGCCTATCAGAAAGTGGTGGCTGGTGTGGCTAATGCCCTGGCCCACAAGT
ATCACTAAGCTCGCTTTCTTGCTGTCCAATTTCTATTAAAGGTTCCTTTGTTCCCTAAGTCCAACTACTAAACTGGG
GGATATTATGAAGGGCCTTGAGCATCTGGATTCTGCCTAATAAAAAACATTTATTTTCATTGCAATGATGTATTTAA
ATTATTTCTGAATATTTTACTAAAAAGGGAATGTGGGAGGTCAGTGCATTTAAAACATAAAGAAATGAAGAGCTAGT
TCAAACCTTGGGAAAATACACTATATCTTAAACTCCATGAAAGAAGGTGAGGCTGCAAACAGCTAATGCACATTGGC
AACAGCCCTGATGCCTATGCCTTATTCATCCCTCAGAAAAGGATTCAAGTAGAGGCTTGATTTGGAGGTTAAAGTTT
TGCTATGCTGTATTTTACATTACTTATTGTTTTAGCTGTCCTCATGAATGTCTTTTCACTACCCATTTGCTTATCCT
GCATCTCTCAGCCTTGACTCCACTCAGTTCTCTTGCTTAGAGATACCACCTTTCCCCTGAAGTGTTCCTTCCATGTT
TTACGGCGAGATGGTTTCTCCTCGCCTGGCCACTCAGCCTTAGTTGTCTCTGTTGTCTTATAGAGGTCTACTTGAAG
AAGGAAAAACAGGGGGCATGGTTTGACTGTCCTGTGAGCCCTTCTTCCCTGCCTCCCCCACTCACAGTGACCCGGAA
TCTGCAGTGCTAGTCTCCCGGAACTATCACTCTTTCACAGTCTGCTTTGGAAGGACTGGGCTTAGTATGAAAAGTTA
GGACTGAGAAGAATTTGAAAGGGGGCTTTTTGTAGCTTGATATTCACTACTGTCTTATTACCCTATCATAGGCCCAC
CCCAAATGGAAGTCCCATTCTTCCTCAGGATGTTTAAGATTAGCATTCAGGAAGAGATCAGAGGTCTGCTGGCTCCC
TTATCATGTCCCTTATGGTGCTTCTGGCTCTGCAGTTATTAGCATAGTGTTACCATCAACCACCTTAACTTCATTTT
TCTTATTCAATACCTAGGTAGGTAGATGCTAGATTCTGGAAATAAAATATGAGTCTCAAGTGGTCCTTGTCCTCTCT
CCCAGTCAAATTCTGAATCTAGTTGGCAAGATTCTGAAATCAAGGCATATAATCAGTAATAAGTGATGATAGAAGGG
TATATAGAAGAATTTTATTATATGAGAGGGTGAAACCTAAAATGAAATGAAATCAGACCCTTGTCTTACACCATAAA
CAAAAATAAATTTGAATGGGTTAAAGAATTAAACTAAGACCTAAAACCATAAAAATTTTTAAAGAAATCAAAAGAAG
AAAATTCTAATATTCATGTTGCAGCCGTTTTTTGAATTTGATATGAGAAGCAAAGGCAACAAAAGGAAAAATAAAGA
AGTGAGGCTACATCAAACTAAAAAATTTCCACACAAAAAAGAAAACAATGAACAAATGAAAGGTGAACCATGAAATG
GCATATTTGCAAACCAAATATTTCTTAAATATTTTGGTTAATATCCAAAATATATAAGAAACACAGATGATTCAATA
ACAAACAAAAAATTAAAAATAGGAAAATAAAAAAATTAAAAAGAAGAAAATCCTGCCATTTATGCGAGAATTGATGA
ACCTGGAGGATGTAAAACTAAGAAAAATAAGCCTGACACAAAAAGACAAATACTACACAACCTTGCTCATATGTGAA
ACATAAAAAAGTCACTCTCATGGAAACAGACAGTAGAGGTATGGTTTCCAGGGGTTGGGGGTGGGAGAATCAGGAAA
CTATTACTCAAAGGGTATAAAATTTCAGTTATGTGGGATGAATAAATTCTAGATATCTAATGTACAGCATCGTGACT
GTAGTTAATTGTACTGTAAGTATATTTAAAATTTGCAAAGAGAGTAGATTTTTTTGTTTTTTTAGATGGAGTTTTGC
TCTTGTTGTCCAGGCTGGAGTGCAATGGCAAGATCTTGGCTCACTGCAACCTCCGCCTCCTGGGTTCAAGCAAATCT
CCTGCCTCAGCCTCCCGAGTAGCTGGGATTACAGGCATGCGACACCATGCCCAGCTAATTTTGTATTTTTAGTAGAG
ACGGGGTTTCTCCATGTTGGTCAGGCTGATCCGCCTCCTCGGCCACCAAAGGGCTGGGATTACAGGCGTGACCACCG
GGCCTGGCCGAGAGTAGATCTTAAAAGCATTTACCACAAGAAAAAGGTAACTATGTGAGATAATGGGTATGTTAATT
AGCTTGATTGTGGTAATCATTTCACAAGGTATACATATATTAAAACATCATGTTGTACACCTTAAATATATACAATT
TTTATTTGTGAATGATACCTCAATAAAGTTGAAGAATAATAAAAAAGAATAGACATCACATGAATTAAAAAACTAAA
AAATAAAAAAATGCATCTTGATGATTAGAATTGCATTCTTGATTTTTCAGATACAAATATCCATTTGACTGTTTACT
CTTTTCCAAAACAATACAATAAATTTTAGCACTTTATCTTCATTTTCCCCTTCCCAATCTATAATTTTATATATATA
TATTTTAGATATTTTGTATAGTTTTACTCCCTAGATTTTCTAGTGTTATTATTAAATAGTGAAGAAATGTTTACACT
TATGTACAAAATGTTTTGCATGCTTTTCTTCATTTCTAACATTCTCTCTAAGTTTATTCTATTTTTTCCTGATTATC
CTTAATATTATCTCTTTCTGCTGGAAATATATTGTTACTTTTGGTTTATCTAAAAATGGCTTCATTTTCTTCATTCT
AAAATCATGTTAAATTAATACCACTCATGTGTAAGTAAGATAGTGGAATAAATAGAAATCCAAAAACTAAATCTCAC
AAAATATAATAATGTGATATATAAAAATATAGCTTTTAAATTTAGCTTGGAAATAAAAAACAAACAGTAATTGAACA
ACTATACTTTTTGAAAAGAGTAAAGTGAAATGCTTAACTGCATATACCACAATCGATTACACAATTAGGTGTGAAGG
TAAAATTCAGTCACGAAAAAACTAGAATAAAAATATGGGAAGACATGTATATAATCTTAGAGATAACAGTGTTATTT
AATTATCAACCCAAAGTAGAAACTATCAAGGGAGAAATAAATTCAGTCAACAATAAAAGCATTTAAGAAGTTATTCT
AGGCTGGGAGCGGTGGCTCACACCTGCAATTGCAGCACTTTGGGAGGCCTAGACAGGCGGATCACGACGTCAGGAGT
TCAAGATCAGCCTGGCCAACATAGTGAAACCTCATCGCTACTAAAAATATAAAAACTTAGCCTGGCGTGGTGGCAGG
CATGTGTAATCCCAGCAATTTGGGAGGCTGAGGCAGGAGAATCGCTTGATCCTGGGAGGCAGAGGTTGCAGTGAGCC
AAGATTGTGCCACTGCATTCCAGCCCAGGTGACAGCATGAGACTCCGTCACAAAAAAAAAAGAAAAAAAAGGGGGGG
GGGGGCGGTGGAGCCAAGATGACCGAATAGGAACAGCTCCAGTCTATAGCTCCCATCGTGAGTGACGCAGAAGACGG
GTGATTTCTGCATTTCCAACTGAGGTACCAGGTTCATCTCACAGGGAAGTGCCAGGCAGTGGGTGCAGGACAGTAGT
GCAGTGCACTGTGCATGAGCCGAAGCAGGGCGAGGCATCACCTCACCCGGGAAGCACAAGGGGTCAGGGAATTCCCT
TTCCTAGTCAAAGAAAAGGGTGACAGATGGCACCTGGAAAATCGGGTCACTCCCGCCCTAATACTGCGCTCTTCCAA
CAAGCTTAACAAATGGCACACCAGGAGATTATATCCCATGCCTGGCTCAGAGGGTCCTACGCCCATGGAGCCTCGCT
CATTGCTAGCACAGCAGTCTGAGGTCAAACTGCAAGGTGGCAGTGAGGCTGGGGGAGGGGTGCCCACCATTGTCCAG
GCTTGAGCAGGTAAACAAAGCCGCCTGGAAGCTCGAACTGGGTGGAGCCCACCACAGCTCAAGGAGGCCTGCCTGCC
TCTGTAGGCTCCACCTCTAGGGGCAGGGCACAGACAAACAAAAGACAACAAGAACCTCTGCAGACTTAAATGTCCCT
GTCTGACAGCTTTGAAGAGAGTAGTGGTTCTCCCAGCACATAGCTTCAGATCTGAGAACAGGCAGACTGCCTCCTCA
AGTGGGTCCCTGACCCCCGAGTAGCCTAACTGGGAGGCATCCCCCAGTAGGGCGGACTGACACCTCACATGGCTGGT
ACTCCTCTAAGACAAAACTTCCAGAGGAATGATCAGGCAGCAGCATTTGCGGTTCACCAATATCCACTGTTCTGCAG
CCACCGCTGCTGATACCCAGGAAAACAGCATCTGGAGTGGACCTCCAGTAAACTCCAACAGACCTGCAGCTGAGGGT
CCTGACTGTTAGAAGGAAAACTAACAAACAGAAAGGACATCCACACCAAAAACCCATCTGTACATCACCATCATCAA
AGACCAAAGGTAGATAAAACCATAAAGATGGGGAAAAAGCAGAGCAGAAAAACTGGACACTCTAAAAATGAGAGTGC
CTCTCCTTCTCCAAAGTAACGCAGCTCCTCACCAGCAATGGAACAAAGCTGGGCAGAGAATGACTTTGACGAGTTGA
GAGAGGAAGGCTTCAGAAGATCAAACTACTCCAAGCTAAAGGAGGAAGTTCGAACAAACGGCAAAGAAGTAAAAAAC
TTTGAAAAAAAATTAGATGAATGGATAACTAGAATAACCAATGCACAGAAGTCCTTAAAGGACCTGATGGAGCTGAA
AACCAAGGCAGGAGAACTACGTGACAAATACACAAGCCTCAGTAACCGATGAGATCAACTGGAAGAAAGGGTATCAA
TGACGGAAGATGAAATGAATGAAATGAAGCATGAAGAGAAGTTTAGAGAAAAAAGAATAAAAAGAAACGAACAAAGC
CTCCAAGAAATATGGGACTATGTGAAAAGACCAAATCTACATCTAATTGGTGTAGCTGAAAGTGATGGGGAGAATGG
AACCAAGTTGGAAAACACTCTGCAGGATATTATCCAGGAGAACTTCCCCAATCTAGCAAGGCAGCCCAAATTCACAT
TCAGGAAATACAGAGAACGCCACAAAGATACTCCTAGAGAAAAGCAACTCCAAGACACATAACTGACAGATTCACCA
AAGTTGAAATGAAGGAAAAAATGTTAAGGGCAGCCAGAGAGAAAGGTCGGGTTACCCACAAAGGGAAGCCCATCAGA
CTAACAGCTGATCTATCGGCAGAAACTCTACAAGCCAGAAGAAAGTGGGGGCCAATATTCAACATTGTTAAAGAAAA
GAATTTTCGGCCCAGAATTTCATATCCAGCCAAACTAAGCTTCATAAGCATTGGAGAAATAAAATCCTTTACAGACA
AGCAAATGCTGAGAGATTTTGTCACCACCAGGCCTGCCCTACAAGAGCTCCTGAAGGAAGCACTAAACATGGAAAGG
AACAACTAGTATCAGCCACTGCAAAAACATGCCAAATTGTAAACGACCATCAAGGCTAGGAAGAAACTGCATCAAGG
AGCAAAATAACCAGCTAACATCATAATGACAGGATCAAATTCATACATAACAATACTCACCTTAAATGTAAATAGGC
TAAATGCTCCAATTAAAAGACACAGACTGGCAAATTGGATAAGGAGTCAAGACCCATCTGTCGTTATGTATTCAGGA
AACCCATCTCACGTGCAGAGACACACATAGGCTCGAAATAAAAGGATGGAGGAATATCTACCAAGCAAATGGAAAAC
AAAAAAAGGCAGGGGTTGCAATCCTAGTCTCTGATAAAACAGATTTTAAACCAACAAAGATCAAAAGAGACAAAGAA
GGCCATTACATAATGGCAAAGGGATCTATTCAAGAAGAAGAACTAACTATACTAAATATATATGCACCCAATACAGG
AGCACCCAGATTCATAAAACAAGTCCTGAGTGACCTACAAAGAGACTTAGATGCCCACACAATAATAATGGGAGACT
TTAACACCCCACTGTCAACATTAGACAGATCAACGAGACAGAAAGTTAACAAGGATATCCAGGAATTGGACTCAGCT
CTGCACCAAGCAGACCTAATAGACATCTACAGAACTCTCCACCCCAAATCAACAGAATATACATTCTTTTCAGCACC
ACACCACACCTATTCCAAAACTGACCACATAGTTGGAAGTAAAGCTCTCCTCAGCAAATGTAAAAGAACAGAAACTA
TAACAAACTGTCTCTCAGACCACAGTGCAATCAAACTAGAACTCAGGATTAAGAAACTCACTCAAAACCACTCAGCT
ACATGGAAACTGAACAGCCTGCTCCTGAATGACTACTGGGTACATAACAAAATGAAGGCAGAAATAAAGATGTTCTT
TGAAACAACGAGAACAAAGACACAACACACCAGAATCTCTGAGACACATTCAAAGCAGTGTGTAGAGGGAAATTTAT
AGCACTAAATGCCCACAAGGGAAAGCAGGAAAGATCTAAAATTGACACCCTAACATCACAATTAAAAAACTAGAGAA
GCAGGAGCAAACACATTCAAAAGCTAACAGAAGACAAGAAATAACTAAGATCAGAGCAGAAGTGAAGAAGATAGAGA
CACAAAAAACCCTTCAAAAAAATCAATGAATCCAGAAGCTGTTTTTTTGAAAAGATCAACAAAATTGATAGACTGCT
AGCAAGACTAATAAAGAAGAAAGGGGAGAAGAATCAAATAGACGCAATAAAAAATGACACGGGGTATCACCACTGAT
CCCACAGAAATACAAACTACCGTCAGAGAATACTATAAACACCTCTACGCAAATAAACTAGAAAATCTAGAAGAAAT
GGATAAATTCCTCGACACATACACTCTGCCAAGACTAAACCAGGAAGAAGTTGTATCTCTGAATAGACCAATAACAG
GCTCTGAAATTGAGGCAATAATTAATAGCTTATCAACCAAAAAAAGTCCGGGACCAGTAGGATTCATAGCCGAATTC
TACCAGAGGTACAAGGAGGAGCTGGTACCATTCCTTCTGAAACTATTCCAATCAATAGAAAAAGAGGGAATCCTCCC
TAACTCATTTTATGAGGCCAGCATCATCCTGATACCAAAGCCTGACAGAGACACAACAAAAAAAGAGAATGTTACAC
CAATATCCTTGATGAACATCGATGCAAAAATCCTCAATAAAATACTGGCAAACTGAATCCAGCAGCACATCAAAAAG
CTTATCCTCCATGATCAAGTGGGCTTCATCCCTGCCATGCAAGGCTGGTTCAACATACGAAATCAATAAACATAATC
CAGCATATAAACAGAACCAAAGACACAAACCATATGATTATCTCAATAGATGCAGAAAAGGCCTTTGACAAAATTCA
ACAATGCTTCATGCTAAAAACTCTCAATAAATTAGGTATTGATGGGACATATCTCAAAATAATAAGAGCTATCTATG
ACAAACCCACAGCCAATATCATACTGAGTGGACAAAAACTGGAAGCATTCCCTTTGAAAACTGGCACAAGGCAGGGA
TGCCCTCTCTCACCACTCCTATTCAACATAGTGTTGGAAGTTCTGGCCAGGGCAATCAGGCAGGAGAAGGAAATAAA
GGGCATTCAATTAGGAAAAGAGGAAGGTGAAATTGTCCCTGTTTGCAGATGACATGATTGTATATCTAGAAAACCCC
ATTGTCTCAGCCCAAAATCTCCTTAAGCTGATAAGCAACTTCAGCAAAGTCTCAGGATATAAAATCAGTGTGCAAAA
ATCACAAGTATTCCTATGCACCAATAACAGACAAACAGAGAGCCAAATCATGAGTGAACTCCCATTCACAATTGCTT
CAAAGAGAATAAAATACCTAGGAATCCAACTTACAAGGGATGTGAAGGACCTCTTCAAGGAGAACTACAAACCACTG
CTCAATGAAATAAAAGAGGATACAAACAAATGGAAGAACATTCCATGCTTATGGGTAGGAAGAATCATATCGTGAAA
ATGGTCATACTGCCCAAGGTAATTTATAGATTCAATGCCATCCCCATCAAGCTACCAATGACTTTCTTCACAGAACT
GGAAAAAACTACTTTAAAGTTCATATGGAATCAAAAAAGAGCCCACATCACCAAGGCAATCCTAAGCCAAAAGAACA
AAGCTGGAGGCATCACGCTACCTGACTTCAAACTATACTACAATGCTACGGTAACCAAAACAGCATGGTACTGGTAC
CAAAACAGAGATCTAGACCAATGGAACAGAACAGAGCCCTCAGAAATAATGCCGCATATCTACAACTATCCGATCTT
TGACAAACCTGAGAGAAACAAGCAATGGGGAAAGGATTCCCTATTTAATAAATGGTGCTGGGAAAACTGGCTAGCCA
TATGTAGAAAGCTGAAACTGGATCCTTCCTTACACCTTATACAAAAATTAATTCAAGATGGATTAAAGACTTAAACA
TTAGACCTAAAACCATAAAAACCCTAGAAAAAAACCTAGGCAATACCATTCAGGACATAGGCATGGGCAAGGACTTC
ATGTCTAAAACACCAAAACGAATGGCAACAAAAGACAAAATGGACAAACGGGATCTAATTAAACTAAAGAGCTTCTG
CACAGCTAAAGAAACTACCATCAGAGTGAACAGGCAACCTACAAAATGGGAGAAAATTTTTGCAATCTACTCATCTG
ACAAAGGGCTAATATCCAGAATCTACAATGAACTCAAACAAATTTACAAGAAAAAACAAACAACCCCATCAAAAAGT
GGGCAAAGGATATGAACAGACACTTCTCAAAAGAAGACATTTATGTAATCAAAAAACACATGAAAAAATGCTCATCA
TCACTAGCCATCAGAGAAATGCAAATCAAAACCACAATGAGATACCATCTCACACCAGTTAGAATGGCGATCATTAA
AAAGTCAGGAAACAACAGGTGCTGGAGAGGATGTGGAGAAACAGGAACAACTTTTACACTGTTGGTGGGACTGTAAA
CTAGTTCAACCATTGCGGAAGTCAGTGTGGCAATTCCTCAGGAATCTAGAACTAGAAATACCATTTGACCCAGCCAT
CCCATTACTGGGTAGATACCCAAAGGATTATAAATCATGCTGCTATAAAGACACATGCACACGTATGTTTATTGCAG
CACTATTCACAATAGCAAAGACTTGGAACCAACCCAAATGTCCAACAACGATAGATTGGATTAAGAAAATGTGGCAC
ATATACACCATGGAATACTATGCAGCCATAAAAAATGATGAGTTCATGTCCTTTGTAGGGACATGGATGAAGCTGGA
AACTATCATTCTCAGCAAACTATCACAAGGACAATAAACCAAACACCGCATGTTCTCACTCATAGGTGGGAATTGAA
CAATGAGAACACATGGACACATGAAGAGGAACATCACACTCTGGGGACTGTTATGGGGTGGGGGGCAGGGGCAGGGA
TAGCACTAGGAGATATACCTAATGCTAAATGACGAGTTAATGGGTGCAGCACACCAACATGGCACATGTATACATAT
ATAACAAACCTGCCGTTGTGCACATGTACCCTAAAACTTGAAGTATAATAATAAAAAAAAGTTATCCTATTAAAACT
GATCTCACACATCCGTAGAGCCATTATCAAGTCTTTCTCTTTGAAACAGACAGAAATTTAGTGTTTTCTCAGTCAGT
TAAC

NCBI Accession No. P68871 (SEQ ID NO: 250)

MVHLTPEEKSAVTALWGKVNVDEVGGEALGRLLVVYPWTQRFFESFGDLS
TPDAVMGNPKVKAHGKKVLGAFSDGLAHLDNLKGTFATLSELHCDKLHVD
PENFRLLGNVLVCVLAHHFGKEFTPPVQAAYQKVVAGVANALAHKYH

NCBI Accession No. NP_000509 (SEQ ID NO: 251)

MVHLTPEEKSAVTALWGKVNVDEVGGEALGRLLVVYPWTQRFFESFGDLS
TPDAVMGNPKVKAHGKKVLGAFSDGLAHLDNLKGTFATLSELHCDKLHVD
PENFRLLGNVLVCVLAHHFGKEFTPPVQAAYQKVVAGVANALAHKYH

NCBI Accession No. NP_269215 (SEQ ID NO: 252)

MDKKYSIGLDIGTNSVGWAVITDEYKVPSKKFKVLGNTDRHSIKKNLIGA
LLFDSGETAEATRLKRTARRRYTRRKNRICYLQEIFSNEMAKVDDSFFHR
LEESFLVEEDKKHERHPIFGNIVDEVAYHEKYPTIYHLRKKLVDSTDKAD
LRLIYLALAHMIKFRGHFLIEGDLNPDNSDVDKLFIQLVQTYNQLFEENP
INASGVDAKAILSARLSKSRRLENLIAQLPGEKKNGLFGNLIALSLGLTP
NFKSNFDLAEDAKLQLSKDTYDDDLDNLLAQIGDQYADLFLAAKNLSDAI
LLSDILRVNTEITKAPLSASMIKRYDEHHQDLTLLKALVRQQLPEKYKEI
FFDQSKNGYAGYIDGGASQEEFYKFIKPILEKMDGTEELLVKLNREDLLR
KQRTFDNGSIPHQIHLGELHAILRRQEDFYPFLKDNREKIEKILTFRIPY
YVGPLARGNSRFAWMTRKSEETITPWNFEEVVDKGASAQSFIERMTNFDK
NLPNEKVLPKHSLLYEYFTVYNELTKVKYVTEGMRKPAFLSGEQKKAIVD
LLFKTNRKVTVKQLKEDYFKKIECFDSVEISGVEDRFNASLGTYHDLLKI
IKDKDELDNEENEDILEDIVLTLTLFEDREMIEERLKTYAHLFDDKVMKQ
LKRRRYTGWGRLSRKLINGIRDKQSGKTILDFLKSDGFANRNFMQLIHDD
SLTFKEDIQKAQVSGQGDSLHEHIANLAGSPAIKKGILQTVKVVDELVKV
MGRHKPENIVIEMARENQTTQKGQKNSRERMKRIEEGIKELGSQILKEHP
VENTQLQNEKLYLYYLQNGRDMYVDQELDINRLSDYDVDHIVPQSFLKDD
SIDNKVLTRSDKNRGKSDNVPSEEVVKKMKNYWRQLLNAKLITQRKFDNL
TKAERGGLSELDKAGFIKRQLVETRQITKHVAQILDSRMNTKYDENDKLI
REVKVITLKSKLVSDFRKDFQFYKVREINNYHHAHDAYLNAVVGTALIKK
YPKLESEFVYGDYKVYDVRKMIAKSEQEIGKATAKYFFYSNIMNFFKTEI
TLANGEIRKRPLIETNGETGEIVWDKGRDFATVRKVLSMPQVNIVKKTEV
QTGGFSKESILPKRNSDKLIARKKDWDPKKYGGFDSPTVAYSVLVVAKVE
KGKSKKLKSVKELLGITIMERSSFEKNPIDFLEAKGYKEVKKDLIIKLPK
YSLFELENGRKRMLASAGELQKGNELALPSKYVNFLYLASHYEKLKGSPE
DNEQKQLFVEQHKHYLDEIIEQISEFSKRVILADANLDKVLSAYNKHRDK
PIREQAENIIHLFTLTNLGAPAAFKYFDTTIDRKRYTSTKEVLDATLIHQ
SITGLYETRIDLSQLGGD

NCBI Accession No. WP_011681470 (SEQ ID NO: 253)

MTKPYSIGLDIGTNSVGWAVTTDNYKVPSKKMKVLGNTSKKYIKKNLLGV
LLFDSGITAEGRRLKRTARRRYTRRRNRILYLQEIFSTEMATLDDAFFQR
LDDSFLVPDDKRDSKYPIFGNLVEEKAYHDEFPTIYHLRKYLADSTKKAD
LRLVYLALAHMIKYRGHFLIEGEFNSKNNDIQKNFQDFLDTYNAIFESDL
SLENSKQLEEIVKDKISKLEKKDRILKLFPGEKNSGIFSEFLKLIVGNQA
DFRKCFNLDEKASLHESKESYDEDLETLLGYIGDDYSDVFLKAKKLYDAI
LLSGELTVTDNETEAPLSSAMIKRYNEHKEDLALLKEYIRNISLKTYNEV
EKDDTKNGYAGYIDGKTNQEDFYVYLKKLLAEFEGADYFLEKIDREDFLR
KQRTFDNGSIPYQIHLQEMRAILDKQAKFYPFLAKNKERIEKILTFRIPY
YVGPLARGNSDFAWSIRKRNEKITPWNFEDVIDKESSAEAFINRMTSFDL
YLPEEKVLPKHSLLYETFNVYNELTKVRFIAESMRDYQFLDSKQKKDIVR
LYFKDKRKVTDKDIIEYLHAIYGYDGIELKGIEKQFNSSLSTYHDLLNII
NDKEFLDDSSNEAIIEEIIHTLTIFEDREMIKQRLSKFENIFDKSVLKKL
SRRHYTGWGKLSAKLINGIRDEKSGNTILDYLIDDGISNRNEMQLIHDDA
LSFKKKIQKAQIIGDEDKGNIKEVVKSLPGSPAIKKGILQSIKIVDELVK
VMGGRKPESIVVEMARENQYTNQGKSNSQQRLKRLEKSLKELGSKILKEN
IPAKLSKIDNNALQNDRLYLYYLQNGKDMYTGDDLDIDRLSNYDIDHIIP
QAFLKDNSIDNKVLVSSASNRGKSDDVPSLEVVKKRKTFWYQLLKSKLIS
QRKFDNLTKAERGGLSPEDKAGFIQRQLVETRQITKHVARLLDEKFNNKK
DENNRAVRTVKIITLKSTLVSQFRKDFELYKVREINDFHHAHDAYLNAVV
ASALLKKYPKLEPEFVYGDYPKYNSFRERKSATEKVYFYSNIMNIFKKSI
SLADGRVIERPLIEVNEETGESVWNKESDLATVRRVLSYPQVNVVKKVEE
QNHGLDRGKPKGLFNANLSSKPKPNSNENLVGAKEYLDPKKYGGYAGISN
SFTVLVKGTIEKGAKKKITNVLEFQGISILDRINYRKDKLNELLEKGYKD
IELIIELPKYSLFELSDGSRRMLASILSINNKRGEIHKGNQIFLSQKFVK
LLYHAKRISNTINENHRKYVENHKKEFEELFYYILEFNENYVGAKKNGKL
LNSAFQSWQNHSIDELCSSFIGPTGSERKGLFELTSRGSAADFEFLGVKI
PRYRDYTPSSLLKDATLIHQSVTGLYETRIDLAKLGEG

GenBank Accession No. ABD57356.1 (SEQ ID NO: 254)

MNEQAKQLVAVTRQPALNAGVGLVLAQLAEVEARQIPGSLAEARAHCLAQ
GAPDILLVEVENPQTLAADLAALAECCPPQMRLVLLGERGDVTLFRWLIS
VGVDDYYPAPLDPDALRTGLLRLLGVPLVTSLRKGRVICVVGAAGGVGTS
TVAANLAMALADQHHRQVALLDLNLHHSRHPILLGSDYAPPGEQWWQATD
RLDGTLLAHTAHQLGPRLFLFYDEGQELVLGAEQLVAAVNVMAEHYSTLI
IDVPDLRTHGLRALLQEADVVLWLHDFSLGALRLLGQCPQGGQAQRRLLV
GNHCRGKEGRVPAQELERVCGQPHAAVLPYDHGVFVRAERAGQPLIQQKS
KLARALTLLAGELVGAQVTGRGRR

GenBank Accession No. ANW61888.1 (SEQ ID NO: 255)

MAPKKKRKVMSQFDILCKTPPKVLVRQFVERFERPSGEKIASCAAELTYL
CWMITHNGTAIKRATFMSYNTIISNSLSFDIVNKSLQFKYKTQKATILEA
SLKKLIPAWEFTIIPYNGQKHQSDITDIVSSLQLQFESSEEADKGNSHSK
KMLKALLSEGESIWEITEKILNSFEYTSRFTKTKTLYQFLFLATFINCGR
FSDIKNVDPKSFKLVQNKYLGVIIQCLVTETKTSVSRHIYFFSARGRIDP
LVYLDEFLRNSEPVLKRVNRTGNSSSNKQEYQLLKDNLVRSYNKALKKNA
PYPIFAIKNGPKSHIGRHLMTSFLSMKGLTELTNVVGNWSDKRASAVART
TYTHQITAIPDHYFALVSRYYAYDPISKEMIALKDETNPIEEWQHIEQLK
GSAEGSIRYPAWNGIISQEVLDYLSSYINRRI

### OTHER EMBODIMENTS

[0432] While we have described a number of embodiments, it is apparent that our disclosure and examples also provide other embodiments that utilize or are encompassed by the compositions and methods described herein. Therefore, it will be appreciated that the scope of disclosure is to be defined by that which may be understood from the disclosure rather than by the specific embodiments that have been represented by way of example. Limitations described with respect to one aspect of the disclosure, in certain embodiments, be practiced with respect to other aspects of the disclosure. For example, limitations of claims that depend directly or indirectly from a certain independent claim presented herein serve as support for those limitations being presented in additional dependent claims of one or more other independent claims.

1. A method of selectively targeting a hematopoietic cell type, the method comprising administering to a subject or system an adenoviral vector, wherein the adenoviral vector comprises:
(a) a capsid comprising one or more viral polypeptides of an Ad3, Ad7, Ad11, Ad14, Ad16, Ad21, Ad34, Ad37, or Ad50 serotype, wherein the one or more viral polypeptides comprise one or more of a:
(i) fiber knob;
(ii) fiber shaft;
(iii) fiber tail;
(iv) penton; and
(v) hexon; and
(b) a double-stranded DNA genome comprising a heterologous nucleic acid payload.

2. The method of claim 1, wherein the genome further comprises:
(a) a 3′ ITR and a 5′ ITR, wherein each of the 3′ ITR and the 5′ ITR are of the viral polypeptide serotype; and
(b) a packaging sequence, wherein the packing sequence is of the viral polypeptide serotype.

3. The method of claim 1, wherein the hematopoietic cell type is or comprises:
(i) a terminally differentiated cell type;
(ii) a progenitor cell type;
(iii) common lymphoid progenitors (CLPs), T cells, NK cells, colony forming unit (CFU)-pre B cells, B cells, common myeloid progenitors (CMPs), granulocyte-macrophage progenitors (GMPs), CFU-M cells, monoblasts, monocytes, macrophages, CFU-G cells, myeloblasts, granulocytes, neutrophils, eosinophils, basophils, megakaryocyte-erythrocyte progenitors (MEPs), BFU-E cells, CFU-E cells, erythroblasts, erythrocytes, CFU-Mk cells, megakaryocytes, and/or platelets; or
(iv) a mammalian hematopoietic cell type, optionally wherein the mammalian hematopoietic cell type is a human hematopoietic cell type.

4.-5. (canceled)

6. The method of claim 1, wherein the method is a method of in vivo gene therapy, optionally wherein the subject is a mammalian subject, optionally wherein the mammalian subject is a human subject.

7.-8. (canceled)

9. The method of claim 6, wherein the method comprises:
(i) mobilization of hematopoietic cells of the subject prior to administration of the adenoviral vector;
(ii) administering one or more immunosuppression agents to the subject, optionally wherein the administration of the one or more immunosuppression agents is prior to the administration of the adenoviral vector; or
(iii) a combination thereof.

10. (canceled)

11. The method of claim 1, wherein the method is a method of ex vivo gene therapy, optionally wherein the system is or comprises a biological sample derived from a mammalian donor, optionally wherein the mammalian donor is a human donor.

12.-13. (canceled)

14. The method of claim 1, wherein the heterologous nucleic acid payload comprises a selectable marker, optionally wherein the selectable marker is MGMT^{P140K}.

15. The method of claim 14, wherein the method comprises administering a selecting agent to the subject, optionally wherein the selecting agent comprises O⁶BG and/or BCNU.

16. The method of claim 1, wherein the one or more viral polypeptides comprise the:
(a) fiber knob and fiber shaft;
(b) fiber knob and fiber tail;
(c) fiber knob and penton;
(d) fiber knob and hexon;
(e) fiber knob, hexon, and penton;
(f) fiber shaft and fiber tail;
(g) fiber shaft and penton;
(h) fiber shaft and hexon;
(i) fiber shaft, hexon, and penton;
(j) fiber tail and penton;
(k) fiber tail and hexon;
(l) fiber tail, hexon, and penton;
(m) fiber knob, fiber shaft, and fiber tail;
(n) fiber knob, fiber shaft, and penton;
(o) fiber knob, fiber shaft, and hexon;
(p) fiber knob, fiber shaft, hexon, and penton;
(q) fiber knob, fiber shaft, fiber tail, and penton;
(r) fiber knob, fiber shaft, fiber tail, penton, and hexon; or
(s) penton and hexon.

17. The method of claim 1, wherein:
(i) the fiber knob has a sequence that has at least 80% identity to a sequence selected from SEQ ID NOs: 15, 33, 51, 69, 87, 105, 123, 141, 159, 177, and 195;
(ii) the fiber shaft has a sequence that has at least 80% identity to a sequence selected from SEQ ID NOs: 14, 32, 50, 68, 86, 104, 122, 140, 158, 176, and 194;
(iii) the fiber tail has a sequence that has at least 80% identity to a sequence selected from SEQ ID NOs: 18, 36, 54, 72, 90, 108, 126, 144, 162, 180, and 198;
(iv) the penton has a sequence that has at least 80% identity to a sequence selected from SEQ ID NOs: 16, 34, 52, 70, 88, 106, 124, 142, 160, 178, and 196;
(v) the hexon has a sequence that has at least 80% identity to a sequence selected from SEQ ID NOs: 17, 35, 53, 71, 89, 107, 125, 143, 161, 179, and 197; or
(vi) a combination thereof.

18.-21. (canceled)

22. The method of claim 1, wherein the adenoviral vector comprises a fiber of the serotype of the viral polypeptides.

23. The method of claim 1, wherein the fiber has a sequence that has at least 80% identity to a sequence selected from SEQ ID NOs: 13, 31, 49, 67, 85, 103, 121, 139, and 157.

24. The method of claim 1, wherein the adenoviral vector is a chimeric vector characterized in that the capsid comprises at least one of a fiber knob, fiber shaft, fiber tail, hexon, or penton that is not of the serotype of the viral polypeptides.

25. The method of claim 1, wherein the adenoviral vector is a helper dependent vector.

26. The method of claim 1, wherein the heterologous nucleic acid payload encodes:
(i) a protein;
(ii) a chimeric antigen receptor (CAR), T cell receptor (TCR), antibody, or small RNA, optionally wherein the small RNA is an shRNA;
(iii) a gene editing enzyme or system, wherein the gene editing is selected from CRISPR editing, base editing, prime editing, and zinc finger nuclease editing;
(iv) an agent for treatment of a condition selected from adenosine deaminase deficiency (ADA), adrenoleukodystrophy (ALD), agammaglobulinemia, alpha-1 antitrypsin deficiency, congenital amegakaryocytic thrombocytopenia, amyotrophic lateral sclerosis (Lou Gehrig's disease), ataxia telangiectasia, Batten disease, Bernard-Soulier Syndrome, CD40/CD40L deficiency, chronic granulomatous disease, common variable immune deficiency (CVID), congenital thrombotic thrombocytopenic purpura (cTTP), cystic fibrosis, Diamond Blackfan anemia (DBA), DOCK 8 deficiency, dyskeratosis congenital, Fabry disease, Factor V Deficiency, Factor VII Deficiency, Factor X Deficiency, Factor XI Deficiency, Factor XII Deficiency, Factor XIII Deficiency, familial apolipoprotein E deficiency and atherosclerosis (ApoE), familial erythrophagocytic lymphohistiocytosis, Fanconi anemia (FA), Friedreich ataxia, Gaucher disease, Glanzmann thrombasthenia, glucosemia, glycogen storage disease, glycogen storage disease type I (GSDI), Gray Platelet Syndrome, hemophilia, hemophilia A, hemophilia B, hereditary hemochromatosis, Hurler's syndrome, hyper IgM, Hypogammaglobulinemia, Krabbe disease, major histocompatibility complex class II deficiency (MHC-II), maple syrup urine disease, metachromatic leukodystrophy (MLD), mucopolysaccharidoses, mucopolysaccharidosis type I (MPS I), MPS II (Hunter Syndrome), MPS III (Sanfilippo syndrome), MPS IV (Morquio syndrome), MPS V, MPS VI (Maroteaux-Lamy syndrome), MPS VII (sly syndrome), muscular dystrophy, Niemann-Pick disease, Parkinson's disease, paroxysmal nocturnal hemoglobinuria (PNH), pernicious anemia, phenylketonuria (PKU), Pompe disease, pulmonary alveolar proteinosis (PAP), pure red cell aplasia (PRCA), pyruvate kinase deficiency, refractory anemia, Shwachman-Diamond syndrome, selective IgA deficiency, severe aplastic anemia, severe combined immunodeficiency disease (SCID), Severe combined immunodeficiency due to adenosine deaminase deficiency (ADA-SCID), sickle cell anemia, sickle cell disease, sickle cell trait, Tay Sachs, thalassemia, thalassemia intermedia, von Gierke disease, von Willebrand Disease, Wiskott-Aldrich syndrome (WAS), X-linked agammaglobulinemia (XLA), X-linked severe combined immunodeficiency (SCID-X1), Zellweger syndrome, α-mannosidosis, β-mannosidosis, β-thalassemia, and/or β-thalassemia major; or
(v) a combination thereof.

27.-31. (canceled)

32. A hematopoietic cell comprising an adenoviral vector and an adenoviral vector genome,
wherein the adenoviral vector comprises a capsid comprises one or more viral polypeptides of an Ad3, Ad7, Ad11, Ad14, Ad16, Ad21, Ad34, Ad37, or Ad50 serotype, the one or more viral polypeptides comprising one or more of a:
(i) fiber knob;
(ii) fiber shaft;
(iii) fiber tail;
(iv) penton; and
(v) hexon,
wherein the adenoviral vector genome comprises a double-stranded DNA genome comprising a heterologous nucleic acid payload, and
wherein the hematopoietic cell is a common lymphoid progenitor (CLP), T cell, NK cell, colony forming unit (CFU)-pre B cell, B cell, common myeloid progenitor (CMP) cell, granulocyte-macrophage progenitor (GMP) cell, CFU-M cell, monoblasts, monocyte, macrophage, CFU-G cell, myeloblast, granulocyte, neutrophil, eosinophil, basophil, megakaryocyte-erythrocyte progenitor (MEP) cell, BFU-E cell, CFU-E cell, erythroblast, erythrocyte, CFU-Mk cell, megakaryocyte, and/or platelet.

33. A hematopoietic cell comprising an adenoviral vector genome,
wherein the adenoviral vector genome comprises:
(a) a 3′ ITR and a 5′ ITR, wherein the 3′ ITR and the 5′ ITR are each of the same serotype selected from Ad3, Ad7, Ad11, Ad14, Ad16, Ad21, Ad34, Ad37, and Ad50;
(b) a packaging sequence, wherein the packing sequence is of the same serotype as the 3′ ITR and a 5′ ITR; and
(c) a heterologous nucleic acid payload, and
wherein the hematopoietic cell is a common lymphoid progenitor (CLP), T cell, NK cell, colony forming unit (CFU)-pre B cell, B cell, common myeloid progenitor (CMP) cell, granulocyte-macrophage progenitor (GMP) cell, CFU-M cell, monoblasts, monocyte, macrophage, CFU-G cell, myeloblast, granulocyte, neutrophil, eosinophil, basophil, megakaryocyte-erythrocyte progenitor (MEP) cell, BFU-E cell, CFU-E cell, erythroblast, erythrocyte, CFU-Mk cell, megakaryocyte, and/or platelet.

34. (canceled)

35. A method of in vivo gene therapy in a mammalian subject, the method comprising administering to the subject an adenoviral vector, wherein the adenoviral vector comprises:
(a) a capsid comprising one or more viral polypeptides of an Ad3, Ad7, Ad11, Ad14, Ad16, Ad21, Ad34, Ad37, or Ad50 serotype, wherein the one or more viral polypeptides comprise one or more of a:
(i) fiber knob;
(ii) fiber shaft;
(iii) fiber tail;
(iv) penton; and
(v) hexon; and
(b) a double-stranded DNA genome comprising a heterologous nucleic acid payload.

36.-40. (canceled)

41. An adenoviral donor vector comprising:
(a) a capsid comprising one or more viral polypeptides of an Ad3, Ad7, Ad11, Ad14, Ad16, Ad21, Ad34, Ad37, or Ad50 serotype, wherein the one or more viral polypeptides comprise one or more of a:
(i) fiber knob;
(ii) fiber shaft;
(iii) fiber tail;
(iv) penton; and
(v) hexon; and
(b) a double-stranded DNA genome comprising a heterologous nucleic acid payload.

42.-53. (canceled)

54. An adenoviral donor vector genome comprising:
(a) a 3′ ITR and a 5′ ITR, wherein the 3′ ITR and the 5′ ITR are each of the same serotype selected from Ad3, Ad7, Ad11, Ad14, Ad16, Ad21, Ad34, Ad37, and Ad50;
(b) a packaging sequence, wherein the packing sequence is of the ITR serotype; and
(c) a heterologous nucleic acid payload.

55.-60. (canceled)

61. A pharmaceutical composition comprising an adenoviral vector of claim 41, wherein the pharmaceutical composition is formulated for injection to a subject in need thereof.

62. The method of claim 1, wherein:
(i) the capsid comprises one or more viral polypeptides of an Ad7, Ad11, Ad16, or Ad34 serotype, and wherein the hematopoietic cell type is or comprises monocytes, optionally wherein the monocytes are CD11+/CD14+ monocytes;
(ii) the capsid comprises one or more viral polypeptides of an Ad7, Ad11, Ad16, or Ad34 serotype, and wherein the hematopoietic cell type is or comprises T cells, optionally wherein the T cells are CD3+ T cells;
(iii) the capsid comprises one or more viral polypeptides of an Ad7, Ad11, Ad16, or Ad34 serotype, and wherein the hematopoietic cell type is or comprises NK cells, optionally wherein the NK cells are CD3−/CD56+ NK cells: or
(iv) the capsid comprises one or more viral polypeptides of an Ad7, Ad11, Ad16, or Ad34 serotype, and wherein the hematopoietic cell type is or comprises B cells, optionally wherein the B cells are CD20+ B cells.

63.-76. (canceled)

The application's sequence listing, which the Patent Office published only in electronic form, follows.

SEQUENCE LISTING (256 sequences)

SEQ ID NO: 1 - DNA, 136 bp, Human mastadenovirus B
ctatctatataatataccttatagatggaatggtgccaacatgtaaatgaggtaatttaaaaaagtgcgcgctgtgtggtgattggctgcggggttaacggctaaaaggggcggcgcgaccgtgggaaaatgacgt

SEQ ID NO: 2 - DNA, 136 bp, Human mastadenovirus B
acgtcattttcccacggtcgcgccgccccttttagccgttaaccccgcagccaatcaccacacagcgcgcacttttttaaattacctcatttacatgttggcaccattccatctataaggtatattatatagatag

SEQ ID NO: 3 - DNA, 343 bp, Human mastadenovirus B
gacttatgtgggaggagttatgttgcaagttattacggtaaatgtgacgtaaaacgaggtgtggtttgaacacggaagtagacagttttcccacgcttactgacaggatatgaggtagttttgggcggatgcaagtgaaaattctccattttcgcgcgaaaactaaatgaggaagtgaatttctgagtcatttcgcggttatgccagggtggagtatttgccgagggccgagtagactttgaccgtttacgtggaggtttcgattaccgtgtttttcacctaaatttccgcgtacggtgtcaaagttctgtgtttttacgtaggtgtcagctgatcgctaggg

SEQ ID NO: 4 - DNA, 3439 bp, Human mastadenovirus B
tatttaaacctgacgagttccgtcaagaggccactcttgagtgccagcgagaagagttttctcctccgcgccgcaagtcagttctgcgctttgaaaatgagacacctgcgcttcctgccacaggaggttatctccagtgagaccgggatcgaaatactggagtttgtggtaaataccctaatgggagacgacccggaaccgccagtgcagcctttcgatccacctacgctgcacgatctgtatgatttagagatagacgggccggaggatcccaatgaggaagctgtgaatgggttttttactgattctatgctgctagctgctgatgaaggattggacataaaccctcctcctgagacacttgttaccccaggggtggttgtggaaagcggcataggtgggaaaaaattgcctgatctgggagcagctgaaatggacttgcgttgttatgaagagggttttcctcccagtgatgatgaagatggggaaactgagcagtccatccataccgcagtaaatgagggagtaaaagctgccagcgatgtttttaagttggactgtccggagctgcctggacatggctgtaagtcttgtgaatttcacaggaataacactggaatgaaagaactattgtgctcgctttgctatatgagaatgcactgccactttatttacagtaagtgtatttaagtgaaatttaaaggaatagtgtagctatttaataactgttgaatggtagatttatgtttttttcttgcgattttttgtaggtcctgtgtctgatgatgagtcaccttctcctgattcaactacctcacctcctgaaattcaggcgcccgcacctgcaaacgtatgcaagcccattcctgtgaagcctaagcctgggaaacgccctgctgtggataagcttgaggacttgttggagggtggggatggacctttggaccttagtacccggaaactgccaaggcaatgagtgccctgcagctgtgtttatttaatgtgacgtcatgtaataaaattatgtcagctgctgagtgttttattacttcttgggtggggacttggatatataagtaggagcagatctgtgtggttagctcacagcaacctgctgccatccatggaggtttgggctatcttggaagacctcagacagactaagctactgctagaaaacgcctcggacggagtctctggcctttggagattctggttcggtggtgatctagctaggctagtgtttaggataaaacaggactacagggaagaatttgaaaagttattggacgatagtccgggactttttgaagctcttaacttgggtcatcaggctcattttaaggagaaggttttatcagttttagatttttctactcctggtagaactgctgctgctgtagcttttcttacttttatattggataaatggatccgccaaactcacttcagcaagggatacgttttggatttcatagcagcagctttgtggagaacatggaaggctcgcaggatgaggacaatcttagattactggccagtgcagcctctgggagtagcagggatactgagacacccaccgaccatgccagcggttctgcaggaggagcagcaggaggacaatccgagagccggcctggaccctccggtggaggagtagctgacctgtttcctgaactgcgacgggtgcttactaggtctacgaccagtggacagaacaggggaattaagagggagaggaatcctagtgggaataattcaagaaccgagttggctttaagtttaatgagccgcaggcgtcctgaaactgtttggtggcatgaggttcagagcgaaggcagggatgaagtttcaatattgcaggagaaatattcactagaacaacttaagacctgttggttggaacctgaggatgattgggaggtggccattaggaattatgctaagatatctctgaggcctgataaacaatatagaattactaagaagattaatattagaaatgcatgctacatatcagggaatggggcagaggttataatagatacacaagataaagcagtttttagatgttgtatgatgggtatgtggccaggggttgtcggcatggaagcagtaacacttatgaatattaggtttaaaggggatgggtataatggcattgtatttatggctaacactaagctgattctacatggttgtagcttttttgggtttaataatacgtgtgtagaagcttgggggcaagttagtgtgaggggttgtagtttttatgcatgctggattgcaacatcaggtagggtcaagagtcagttgtctgtgaagaaatgcatgtttgagagatgtaatcttggcatactgaatgaaggtgaagcaagggtccgccactgcgcagctacagaaactggctgcttcattctaataaagggaaatgccagtgtgaagcataatatgatctgtggacattcggatgagaggccttatcagatgctgacctgcgctggtggacattgcaatattcttgctaccgtgcatatcgtttcacatgcacgcaaaaaatggcctgtatttgaacataatgtgattaccaagtgcaccatgcacataggtggtcgcaggggaatgtttatgccttaccagtgtaacatgaatcatgtgaaggtaatgttggaaccagatgccttttccagagtgagcttaacaggaatctttgatatgaatattcaactatggaagatcctgagatatgatgacactaaaccaagggtgcgcgcatgcgaatgcggaggcaagcatgctagattccagccggtgtgcgtggatgtgactgaagacttgagacccgatcatttggtgcttgcctgcactggagcggagttcggttctagtggtgaagaaactgactaaagtgagtagtggggcaagatgtggatggggactttcaggttggtaaggtgggcagattgggtaaattttgttaatttctgtcttgcagctgccatgagtggaagcgcttcttttgaggggggagtatttagcccttatctgacgggcaggctcccaccatgggcaggagttcgtcagaatgtcatgggatccactgtggatgggagacccgtccagcccgccaattcctcaacgctgacctatgccactttgagttcgtcaccattggatgcagctgcagccgccgccgctactgctgccgccaacaccatccttggaatgggctattatggaagcatcgttgccaattccagttcctctaataacccttcaaccctggctgaggacaagctacttgttctcttggcgcagctcgaggccttaacccaacgcttaggcgaactgtctaagcaggtggcccagttgcgtgagcaaactgagtctgctgttgccacagcaaagtctaaataaagatctcaaatcaataaataaa

SEQ ID NO: 5 - DNA, 22697 bp, Human mastadenovirus B
tttaagagtcagcgcgcagtacttgttgaagagagcctcggcgtcctcgagagtgcgctgaagttggtcttcgctcttgtgatacaaacaacttctggtgagcgagcgcagagatcggttttttactttcagttcctgctcttgcccccgactctgctggaaaatggcatagagggttggaaagatccggttcctcagctctctggtctgcgctggctcgttcgctgtgatcctcagtcctcctcctggtgcacttgttgtggattttctaactgctggttttctggtcaccgttgtcgctgctgtatttttctgtcggggttgccgggacttgctgactgcagtaggggctgtggaggtgacggtagtaatgcaagatattgcgggggaagtttacaccgtggtggaagagcaggtatcgccgggtgaaggatatgttgcccccgcattcatgcaagcaggagatgatagcgtttttatgtccacgccaggacttgtatccctgtcgctccttcttaccggtcttggaagcggtggtcgggtttgggaatcgcccggtctcgtcccatctactgttgggccgccgctgggccccccgacccggagcggagatggtagccgtgctgctgtctggggacttgcttgtctccgccgccgatgacaactgtttggcggcggttgcttcttccacctcctctgcctcctcgtcttcctcctccaaactgtcttcctccaggctgtccacctcctctgcctggctgtcccaatcttccatctcctcctctgcctgactgtcccagtcttccttcatatcctctgggggcgacagctgcaccttcaacttcttgcttcctcggcgatgggacatcctgggggaaccttgtgttgagctcctcaccggtctgagggtcaaggtagaccccgtttcccttttttagcagaaattcttggcgagatttttggatggcttgcaattgggccagaattgctccctgggtgatgacgcaggctgagagctcgactttgggaggatgtgattggtcctcatagaacctgatctcatagggatggtagtcctcggggtgaaacttgcgcaggtaggcggaggtccacagccccggtgtcagtttcaaactctgccccggagaagacccctcgcctttacttctgggaccctgcagctcgaaggtgccgataatctgggtctcgctcagcaactgggggttgcaggcaagggagcggtggggtgtgcaaagattgcagcggcagtggcattccagcaggccgtctccgctcacatcctctataacatccgagtggtaggagaggtagttggccaggcggaacaggtagcagtggctccatagcggcggtgggcactcgcggtaggtgagaggcacaaagtcggagggcagcgcacagcaggtggcaggcaggataccggagcgttccaggatgaaagagcgaaagttgttaagcatgctctggctcataaagtctggcaggccgtttcgcagagtaaccctgagacgctcggggaagatgatgtctgccaggtccgaggcgacggtgcgctcatcaaaacctgtccacagggctttgagggatctctgcaagagcttgtccagctcttttaggttctgctcttccaaacactgttgccacacacccataccagtttgccaggtatggcagaggtagaggtagacacagtctcggatgtagtcacggcgggcctcccctttaagggtggtgtgcaggacgctctgccctagtcggttctcatgcaaaatgcccatgtaagaaaccaggttggtaagctccacgttggagatcttgcatgcctgccgcacgaagccatgtctaaaggtgtagtgcaggttctcctctagcttgcgcagggtctcagggtcggtgaaaaagcggcgcagacactccagctccacagttactagcactacagccatcataagcttgcgcctctcttccaaatctcggggggagttggtacccagccagcgagatagctgctcgtcactgactaccggcttgccctcgtccgaggcgtctggatcctgcatgttctggttttctgaaagaggtcttgctcgtttgatgagcagatggtccatgacagcgctcataactttggggggcaggttaacagcggggtaggcaaaatgggtgaccacgatactgcgcttgagcactgcaatccgggcattgtcaccctccagttccaccagagcgctgtggtgttcatccatgtcattctctccctgttgcagagcatttgcggcccgtgtctcatcacttcccagaccctcaaagatctttggaacctcttccaaggaagctatatcaggtaagcgagctcccggacccaagttgagcagggcatcggcgcgggtgcggttggcgcggcaggagactggaatcttttggttcttgaaaaagatgtggtaggtggccaacacttcggggatagtaaaagctggatagaagttgagtcgagggttggcctcgcaggtgccgtttggctgccgcttggggggtacctgaggcgaaaagaggttcagctcgtaggcgcggctaagctcttccacactgatgggcacttcagtgagatcgagcaatgcgtctttaactatgatcgactgccttgctagatgtttgaggagcacgtcctccccaccaaggccggtgaggtagtcggcgacatgatccctgatcccagcctcctggtaaacgccatctgcttgatgctctgggcggtcgtcatcctctctgtctagaaagcgtttcagctcctcctggtgctccgccggcgtcacatagcccgggtcctgctcgacatctgcctcaatctcttccgttttcacattatcctgcgcctgcatctcctgggctgcgtcgacctcctcctcatcatcgagggtagaggtggtggtagcgggactgggtggtggggtggttaagctctcctcctcgtcgctgctgggggcgaggtgtgatggtgcttgcagcgatgttggcagtgatggctgagtttccatgtctgttgtttctctgcctaggagaacacaatggccagccgcggaggaaatcagtcaagcgaccgccaccgggagcacacccccgaacgcggaatgagctctgccagccatccgcctccaaggccagaccgcagcccatctcagtcgcctccacctctgcccccgaagaggaacacctaccgtcgtgtggggtccggttcttctaccgagagccaggtggtattggtaagcgaaacttcgcagtcatccctgtctccggagcggagcaacagtcctcccccgatccctcccaagaagaagcccaggaagaccaagcatgtccctctgcaagacatcagccaggatagtgaagaagaaagagaacaggctcagttggtggccgtgggcttcagctaccccccggtgcgcatcattgagaaggatggcaagagaagtgttgagaagatcgacaagaatgaccctatagctaaaggagctacttttattgctgttaggaatcctttgagtctgcccctggtatctgcctgggagaagggcatggaagtgatggctgtgctaatggaaaggtacaggctggataatgatctgagaacctctttcaagctgatgccagagcagcacgagcaatacaagcgtatctgccaccagtatgtgaacgaggagcaccgtggcatcccgctgacatttaccagcatgaagaccttgacaacaatgatgggaagattcatgcagggattggtacattattattctgagatcgcccacaataattgggagtgcaccgggtgcgctctgtgggctcatggatgcaccgattatgaaggcaaggtgaaatgcctgcatggcactatcatgatccagaaggaccacattatcgagatggatgtggcgagcgagaacgggcagcgcgctatgaaggagaatccagacagagccaagatcacccaaaaccgctggggcagaaatgtggttcagttggccaacaacgatgcccgctgttgtgtgaatgatgccaactgtactactaatcaattttccagcaagtcctgtgggatgttctacaccgagggaagtaaggcccaggaagcttttaagcagtacgaagccttcatgaaggctgtgtacccagggataactcccgaccaagccaggatgatgctgatccccattcattgtgattgcaaccacaagccaggctgcgctcccgtgatgggcaggcagacatgtaagatgaccccctttgggatggccaatgctgaagacttggatgtgactaccatcagtgacccaaccgtgttggcaagcgtaagacacccagcgttgatagtgttccagtgttgcaacccagtgtatcgcaactcccgtgtccagaatgccggccccaactgtgatttcaagatctctgctcctgacctgcttggcgctatgcaactgaccagaaagttgtggcaagacacctttcccgagattccagttcccaagctggtaatccccgagttcaagtggcagaacaggttacagttccgcaacgtatccctgcccgcgggtcactctgactcccgccagaacccattcgacttctgagtaaatgatgaaacaaatgagcaaaaccagagcctcagtgcatgtaaaaataaagtgctgtttattgaacacggttttacatgacttattgcatatccatacggtcaaacgcggtggccctttcaatgcgcgcgcggtgagaacgaaagtaagatgagtgggtgtttaggaagcggtatagcacctcctggttgcggcgcagggtgggctggacttggggtgattggagcatgctgttggacaccccagtcagcaacttcatggtggggtttccgtccatggggcggtcgggccagtgcacaaaggcatgaaggaacatacagcaaaaaagtccacaggcggctgagcgcggaccctgcacgctttgggtagacttctccagggtgatgcagcggtctttggtagcaagggcactgcgacgcaggagcccctcgtactcaaactggtaaatctgtttgagccgctcatccgagaacccaaaaggatcaaaaaggtagcaggtgttgtagcgcgggttccaaccaaaagccagccagtgctctccccccgtctcgcgtccggcagtgttgactatggcgcaggcgagcttgtcgggggccatgaaccccgggaaacgcttgtcaaaggttcccaggaaatagggtccgcagcccaggtctcggacgatggctttgagctcttgctcgctggagccgtttccggacccgcatgtcatggctgcagctgctgcttgcaagaagcaagaggcttcttatgtggtggcgttgccggccgagaacggtgtgcgcaggtagacggcctcgatgacgccgcggtgtggctggtgcactctgaccacgtcgaagacttcgaaaagaagataaagcagggtgggctcatccatgggatccacctcaaaagtcatgtccagcgcatgggctgagttggcatagagcatgttctgtcccaggtcggtaagggcccccatggacatgaagttgctggagaagggaatgcgccacatggtcctgtcgcacaggaactttttctgggtgacactcttaacggcagtagttccgatgagcgggtatggataattggctgggtaaggttccccttgtctcatagtaggtgcaaggtaccctacaaagccagagttgttgtgttggtatggtaaggtgacggctttgtagtcagtgtaattaacctcatcaaccacctgcctgctcataggctggaagtttctgaaaaaggagtacatgcgatccttgtatccctcagggatgtaaaagccctggtagccaatgttgtaattggcaagcatctgaaccaggaaccagtctttggtcatgttgcattgtgccacgttgtatccttccccgtccacagtgcgcttgatttcaaactcatttggactcaacagcctgtcattgccaggccagctgactgaggagtcaaacatgatggagaccttcttgaaagtgtggttaaggtaaaaggtgccatccaggtagggaatagatccagaatatacgaagtagggatcgaaccctgatccaagagatggagtctccttggttttgagtctggtgaaggaccagcccctgaaggctgcccagttgcgagatgggatggaaattggaatgttggttgcattggcaggaatggggtaaagcatgttagctgcagagaggtagtcgttaaatgactgatcattggtatcgttgcgcagcatggcttcaagggtggaagctgtgttgtgagccatggggaagaaggtggcatagagattgatgctggtgaaacttatggtagcaccatccgttctgaggtcatttccaagggaactttgcaggaccatgttcacatcctttcggaagttccactcgtaggtgtaggagccaggtagaagaagtaggttcttgacagcaaagaatttctgaggcacttgtatgtggaaaggcacataacgaccatttcccagaagcatggacctgtagcgcagaccagcattgcggtggtggttgaatggattcacattgtccattgggtcaagagaccacctggcgccaatgttgatgtatgaatcaaccagggatggggataccactcgcccgttcatgtactcataggtgttggtgttagtgggcaaagtaatgttaggtggcgtgtacttgtaaacatctggaaggtacaaagccacattagagtacagaaaacttctccaaaggttagcttggatattaatttccatagccaggttgttgcctatggttatttcattagctggagcaacattagcatctttttcccatccattagtgtcatcggttttaactttaatgccttgatatgtgtgccctggtcctatgccattcagaggaaaacagtaattaggcagttcatcctcgatgccatgattttcaataatgcgaacatcgggatcgtaactgtccacagcctgattccacatgctgaagtatctggttctgtctcccagagaatcaagcaaaagctgatatgacagttcagtatttctgtcctgcaagtcaaccactgcattcagttgtgatgcttggccagccaaaactcccatatttccagtactgttgtagtacattaggcctacgaagttatccctgaagccaatgtaattgggtctgttaggcatggcttgttgacccaaatttgcatgagagttattagacgtttctggtttatataccacatgactgtctggagtttccaaatttacattttccgtataaagcacaatttcaggcgctaaagctcctgcaacagcatctctaccatcgaaaaattccatatcaatatctggttcctcagtttcaacccctccttcggttgttggttttacttttctgtttttagcttggcccccttttatgtttgtaggtcttgcaaaagacccgtagcatggcttcatgttggtagctggtttaagggctcttccaccaaacttttcatttgttccatcagtatcagtccatgattcttctccaacttgaggctctggctgatatgttttatcggcataaatgggcttttcttctccttcagtagtggtaatgtctttcccaatttgcaaaccttctttagtaatattgtctcccttcatggaagcaatgccaaatgtgtttgtggtggtagttactgcattgtccccatttgttgtaactatccactgagatgtattgggcgcgcccttaggagcgagtgaattgtaagctgtgccggaatatggcttgaagctaggacctctatcaagcaccccccgaatgtcaaagaatgtgctggccatgtcaagcactctgttgtcgcctacagccagcgtgtagcgaactttgtaagagtaggtattgtcttcccggtcaacgggcacgaagcgcagcatcaggcgctggctacggtcggtggtcacatcgtgggtgggcgccactgtggggtttctaaatttgttccccatactgaagtaggtgtctgttgcacgggcgaactgcaccagacccggactgaggtactccgaagcatcctgtccggcgatgtgcatgtatgcccattggggcatcatcgatggggtggccatcttgaaagcaactcagcctcggcgcgcgacctcttcctttctcctctgctgcggcggcgtggtgatgatacatacacacagacaagcaagttaagcgctactccatatttaattaatagcagcgacggcgctttacactctgcacgcccagacccacgatgctgttcagagtactttgccagtttgctttcgggcgcggtgtgcccccaggacgcggtctggctacggcgacgggctgtacggcggtgggctttctggtagcgacaggtttgggaacaggcgccgcagaagcagggggaggaggcaagtccaaggtggcgggtcgatgtgactgagaaggtttcatcaccccggtagccatgtgagctacaggcctggtagtgggcattccgagctttactgcctcctcatatgaagggggctcgtctgcgcgcgtcaccagcgtctgctctagctcgggtcgcggacgcttgtcgccccgcttttccagcggaggaagttcttcctccacttccatttcaccaggggttgcgggcggcgggtccaggcggctgtttatctgtttttgtacagcctggttggccagatccactacgccgttaataccagaggcgatcccatcgaccaccttctgttggaagttttgttccttaagcttatttctcagagcctgccctgtgctgctgttccaagctttgttcccataggtttttacggtcgagccaaaatttttaagcccgctccagatactgctccaattgaaggcgcccccgttcagttggctcgtgccgatgtcgctccaggtgcccatgtacggcctcgtgccgtgtcgcggagccagggatgaaaaattgatgtcttccatctctacaaaaacatagtcacaggaccaggagcgtcagagtccattctattttttatttataagttttttccaatgttagtggcgctgcgaggcctgaaccgccactgaagctatgcctggtatcgccccgatcgctgcggcgatgatgggtataagagctggcaaaaagccaccccctaatcgtctgctgatagcgcgccttcgtctgtggcggcgcatccctcgccccaacatccttctacggcgcgagtttcttcctcggtagccagtaatggggacgcgaaggcggcaagtgagggccatatctgcaaggaggcagcgtcaacagtcattaagtggtgatgcttggatggtagcgcgcgcgcggcagcgtcagaggttcagcgcgaccatcgcggtacactctccgcaccagggcggcgggagtcaatttgctggcagtgttgcggcggcggcgacggcgagtgcgacttgcaggtggtttgcggcggcgagaggtgttgctccggtttcgatagtagcgagtgcctctgtaacccggagtgggaatgatggatgggtgcagagcatagttgggcattagcagacttgctgggccgtactttcgtcgtgatcttcgagtggtgctgggggcggcaacgggcgcgggcatccagggttccgtttgcacctcaattgaggtggtgggttttgcaggttcggtctgcacttccatggactcggtgggaatcttgatgtcgaaggtttgtactcccaaacctggcgccacttccttgataggtcttactttgacctcaggctggatatcggcatccactttcattttctccagtacgtcttctagcctctggcgcttgggcaccattagctgcatggtgggatataggtcctcaccctcgcgctttacgcctctccgcgcaggcacgggcagcacttgctgcagggtgactggtttgaggctgggggtgggatttccatgatccaaaggaatggacacagcctcctctttgggactggatctagtgcgcttgccataagcaaactcgtcaaggcggtctgccgcctgctcaagaatatcgtcatccccgtacacctcatcataggaccgtttaaaagtagtgctggaacgctcgccaggtgtaaaaaccacagtggtcccgggtctgagcacttgacgcactttgcgcccgcgccactgcacgcgccgtcttggggcgaactcgcgcacaaactccaccagcccatcatcgtcatcttcttcctttttgttatttttgacccgcttgattttgcggggctttttttcatccttcaccggcggaccgtagatttcaggcgcgatgacctggagcatctcttccttgtatttgcgcttggacatacttgccgctgggacacaacatcggagactgctcagtatcttctaagtgcgaggggggcgggtgcgcacgggcacgcgctggccggtagtggcatcacgcacccagtacacattgcctcttcgcggttgggccatgttggcaatggccgctgctgccgccgtggccgcgcgcctgcgggacctgccgctgctggcacctgaagccgcgcgtctggccgctctaagcatggctcttcgccccacacgtttggccctccgcagaatagcttttgcggctcgcatggcgggagtagccctgtggcgcctggcgatgcgcctccttcggctcttccggcgagcataggcgcgggcgtctgccaccacactgtcaataactgcatccacagtagatgtaggcgcagtaggagtataattacgagcatcggcgaccacctggtcgatcacatcatcgaccgtggtccgagtgcgggtacgacccttgagtgcgccccagggagcgcggaaatgaccgcgaacgcgcacaggatgctgggtagagcgcttgcgggcgcctccatacatcttggtgggcgcatacagtccccaaccggtattattactgggcgagatgagaatggacattttttttttttttagaaagtgcggcttgaaagaacgcgcggcgcgactatgcccagggccttgtaaacgtagggacaggtgcggcgtctggcgtcagtaacggtcacgcgctggactccccggatactgctgcgtaacggcagggtcccgtgatctgtgagagcaggaacgttttcactgacggtggtaattgtgggcgccggcgggcggatgaggatctggttctcagggaagcggttgaagacgtgcgtgagcgaagtggcctgtcggagctgctgagagtacacggcttgctcattgtagaaactctttgagaagacgggcataagctctgcacccaccactgggtagttgttgacttgtcttgtggagcggaaggtgactgggtcttgcatcatgtcagggagcgaccagtagacctgctctgccccacaggtgacatctgaagtggtgagcagtgtccaagaccttattcctttctcagggttaccgtaattgtaggacaggtaccaactgcggtaggctgtgttgattttgtcttccaagacattgtagcttctactcttgctgtctttttctagaggttggatctttaactcttttttaacttcagcagctgcagcttcacgtttttgtttttcagttatataggtatctcctctagttatatcatcatcttcactagtttcctctgcaacagccagtgtggttgtttcagtagtggtatcctttttgctttcctcataggcagtgacatccaaaagggcaggaatattacccccttcaagatcttcatacatgattttgaaaccctcctggaatggatgtctcttcctgatgccaagcaagttgctaagtcggctttcagtaaagtctaccccgcaaccaggcagcaatacaatgtcaggatggaatgcctcataagtgtagacacctggcataatcaacttagtttcggggtcccacccgagcctgaaatttctagtgtcaaacttaacaccaatgtcactttccagcactccattctgtctgccaatttccaggtagttgtcaatgatggcattgttcatcaggtcgatcgtcatggtggctgaaaagttgccttctggtaaaatgaactcaaaccactcatacttcaagatatcctctttatgatcataggtgtcatttactgtaacaccttcaggagcttttctggacaccatcaccctcgccttgaacttgttgctgaacatgtactcgttcacgttgggcatgttggtgtgcatgatggtcttcagctgaccgccccatcgcgaccgctcgtcaaagttgatggtctgggtgctagcctccgtgggggtaaagtcattgttctgcaccaccgtggtcaggaagttgctgtggtcgttctgatagttcagggaggcgatgtccgccgacttgttgtccaccagatacaacttggtggtatcgtacaggggcgacagctccgagtaacgaatgctgtttctcccttccgtaggcgccaggtaccgtgggggtacgaagggagcctccagtgggggctgtatcatcgccgcctgttgctgcatcacgctctcgtaagaaggaggaggaccctccggatacaccaccgctccgcctagcacggctcgtctcctcatcgtactagacacagataacaaaaaagaacgaacgcacgctcggtcgccatggccttggtgagttgcctttttattttactttcacttttacaacatgcgcccgaatctgggacgcagatgagcgaacgggttgccccctcctcttccacccaagtccaacacgctgctatcatcggcagagtcctcatcgtcccacacaagacccatctgcctgtcgtggcgctggcgtctacggatcggtctgcttgtagcccccaagatcctgggctcgtctctgtgatcctgcgcataggtcttccatctactcatcttatccaccagactctctattccattgttggggaagttcttttccctctctggcctcagcaaagagtcattcaagtactcatcctcgcccatcaagcgcgggcgggttattctccccagttcactgctgcgaacgctgtttagtgaaaagggcaagctagggaaaggacttgcagcttcgggcacggtcgcggcagcaccagccgttccggatagcgacacggaagagtgtcttctatcgcccccttccttcttccaaactgtataaccgggaggcggggaaaatatgctgctgtccacatcgtcccacaggaacccgtcattggggtcgggcatgtcgtactcgccagtgtagaaaccaggtgggggcagccagtgtgggttcaggatagcattggtgaaataatcagagttcatggcggccgccctgtgcaggtagtccagcagtttgttaatgaaaggcctgttactagcatacatgctgggctccatgtttcgagctgtcatgtccagcgcggcggtaggtgtcgccccctcctgcatcaggaacagtccaacgctctgttgcacgtatctgaggatccgctcctcctcagcggtaagcgcatactgaggagggatcttctgtgaccggttggttagcaagaagttcagggtggcttccaaactgcccgtgtcttcctgacccagggcgcggctcacttgggtgatttcttgataggtctgctcgtccacctggctctgtcctatggcctcgcgatacaggttaagcaggtagcccaagtacgagttgcggtcaatgctaccgctgtcagtaaagggggataccagcagcagcagcaggcgggagttgggagtcagcaagctagacacggtcgcgcgatcccctactggggcgtgcactccccacagacccttcaggttcttgaaagcctgagtcaggttcactgtctgcaagccctgtctgctggtctggaagaagtaatctggcccggactggtacacctcgctctggggcacctcagctaccatgagtctcaatgcactcaaaaagtttgtatagtcttgctgaccacggggcacgttggcgggctgggtgctgaggaaagcgtttagcgctaccaacgaccccaagttggcgtcgcgctggaatcgctcgcgctgagacacggcctcgcgcacatcggtcaccatccggtccaggttggtttgcacgttgctgctgttgtaacgggccacgcgctccaagagagcattgtataccagcccggcctcatcgggacggatggccttgttctccaccagcgcgttcacgatagccaggaccttctcgtgggtggggttggagcgggagggcactacggcctccagtatggcagaaaggcggttggcctggggttgctgtctaaaggcttcggggttgcgggtcgtcagcgccattatgcgttgcatggcctgggtccaatcgtccgaggagttaatgccggacggctggctctgcagcgccgcccgcattgcggggtccggtgcctgctgctgttccatctagcaaaaatacgggtcgcgccatcagtcttccaagtactcgccctcctcgtcctcgacttcatccacctcttctatgtaaggaagctcacaccctgcagcctccatggccctgcgactgggttgccattgcaaatccgctcccatgtcaaagtagttctccccatcagtcccggcccccgttagagctctttgcaagctgtgcataagttctctgtcgctcagctcgcgcctcctgctggcgctcaccgcgcggtgcatcctgtcattgcgatacacccccagatcgtcgctcagagtcagcaccttcagagtcatgcgcatgtaaaacccatctatcttcacctccttgtctatgggtacgtagggggtcttgtagatcttgcgagcgtagtatttgcccaggctcaagaccgagtagttgatagctgccactttctcagccaaacccaggctacgttcctgcactataatactttgcaggatgttgatcagatcatacagccatctcccatcaggctcggtgatgttcaacaacgcctccctgaatgcctcgttgtccctgctatgttgaaccaccagaaacagctgagctgtcagtggtttgctagtggggttttgggcgatagcctccatcaggtcccacagatgcatcagacccagggtcacttcctcgcgggcgatcagggtgcgcacatggttgttaaaagatttttggaagttgcgctcctccttcacggtctgctcgtaggccgagactaggttggccgcggccacatgtgccctagctgggctgatccctgtgacttcatcgacctcaaaatcctcgtcttgcagcacccgtcttcgatccagaccgtggcgcagctcgcgacccgcgttaaatcgagatgctcgcatctcctctggctcctcgccgctcctgtccctgaacaggttctgctggggcacgtacgcctcgcgagagtccttttttagttgcacccgcgggtgccgctcgggcgatggagcccccaggcgcgccaatccctcgccctcttccaagtccagatcataggcgggctgtcccgcgccgctcacggctgcagctgcagtagttgcaggagcaagaagagccttttgtggctgttgctgagaaggggcctgttgctgggggcgcatctgtcgcagcactggatgcatctgggcgacaaaaacaaaaaaaaaaaaaaaagggctcgctcccgtaaactggagaagtcggctggcggggtcttggaaataacggggctgccaaaccctcgcttgtcgcggaaaccggccgatacgagccgcgcttaggctccaaccggggcataccgcaacgcaaccctggcgactgattctccagactacgggcgcgagccactcacggcccgagaactgagcgttctaaagcttgacgtggcaatggcacacgtccaggaaaaagcagcaaaaacgactctactccgtaccctggatattcgtcggctgggtcgagacgggatagccaataccacgttagccgcggctccggccgatccgagcgtgatcgcttagctttggactcgaaccggggtacaccgcgacccaacccgttcacgttcccccagaccacggagtcgagccgctcatcgctttcgttttctccgtgtctacagagcgtcaatgactgcgcgcgcctcactggccagaccgtgcctaccatgaactacttcatgccgctgcgcaacatctggaaccgcgtgcgcgagttcccacgtgcatccaccaccgcctccggtatcacctggatgtccaggtacatctacggctaccaccgcctcatgctggaagacctcgcccccggagccccggctacagagcgatggcccctgtaccgccagccaccgccacactttctcattggctaccagtacctggtgcgcacctgcaacgattacatctttgacacccgcgcatactcgcgcctcaagtacaccgagctcgtgcgccctgggcaccagacagtcaactggtcagtcatggccaactgctcctacacaatcaacaccggggcctaccaccgcttcgtggactttgacgacttccaagccaccctcacccaggtgcagcaagccatcctcgccgaaagggttgtagcggacctggcacttgtccagcccatgcgcgggttcgggatcactcgcatgcatggcagagcgggcgaagaagaagtgcccgtggaacgactcatgcaagactactataaagatctggccagatgtcaggataatgcttggggaatggctcatcgcctgcgtatccaacaagccggacccaaagacctggtgctcctcgccaccatccgccgtctcaaaactgcctattttaatttcatcaccagcagcatcgtctcaccctcccaagaggaggaaggagaagaaagagagaaccccgaccgagcgtctagccgcccccgcccgcaagaaacagtgctcagcctaccttgcgattgcgactggttagacgctttcgtcgaaaggttttcagatcccgtggatcttgagacgatcaggtccttgcgcggagtacctacggggcaattgataaaatgcataatcagcgcggtgtccctgcccaacggagagcctcccagtcaccacttcagggagatgcgcggaggcgtcttcactctgagacccagggagaacggtcgtgccgtcaccgagaccatgcgccgccgccgcggagaggtcattgaaagattcatcgaccgtctgcccgtgcgccgccggcgtcgccgcgttccccctcctcctgcagccccacctgaagaggaagagatgttagtggaagaagaagagattgaggaagaaatcccaggggctttcgagcgcgaggtgcgcaccaccatcgccgaacttatccgtcttctggaagaggagttgaccgtgtccgcgcgtaactcccagttttttaactttgccgtggacttctacgaggccatggagcgcttggaagcgctgggcgatgtcagcgagatgccgctgagacgatggatcatgtatttcttcgtcaccgagcacatcgccaccacactcaactaccttttccagcgcctatgcaactatgcggtcttcacccgccacgtggagctcaacctcgcccaggtggtcatgcgcgcgagagatcccgtgggggctgtggtctacagccgcgtctggaacgaggcgggcatgaatgcattctctcaactcattgggcgcatctccaacgacctcgcggccaccgtcgagagagcgggccgcggagatcttcaagaggaagagatcgagcagttcatggccgagatcgcctaccaggacaactctggcgacgtgcaagaaatccttaggcaagccgccgtcaacgataccgagattgattctgttgaactctctttcaggttcaagctcacggggccggtagctttcacccagaggcgtcagatccaggatgtcaaccgccgcgtcgtcgcgcatgcgagtcttctcagggcgcagtaccagaacctacccgcgcgcggcgccgacgtaccactgccagccatgccgccgggtcccgagccgcccctgccgcccggtgcgcgccctcgacaccgcttctaaacatgcaagaagcaacagagccaccgccgtccaaaatgaaaaacaagggcacggtggtagcgcccaagggacacggaaccctgcaagccatcgacatctccaccaacggacccgttgagatcaagtactatctgaacctccctcacgccctccaaaagatcatgcaagttaatctcctgacactgcctactaacctgactccgcagcgtctcaggaccctggacagctccggcctgcgcgctctcgtcctcgagctccgcccctgccgcgccgaggtctggacttgcctcccgcgagggctcgtcagcatgaccaccatcgagacagaagatggtcatgccgatgcagacaacatagtaaagcgcgaggtacaagcgccaggcctcaattttccactgaaatttctcgtcaaaggaagtcaggtacaactcattcataaggtgcatcccgtgaatcgctgcgagtactgcggccgtctgtacaagcacaagcatgaatgctcggcgcgtcgcagggagttctacttccatcacatcaacagccattcctccaactggtggcaggagatccagttcttcccgattggctctcatcctcgcacagaaaggctctttctcacctacgatgtggaaacctacacctggatggggtcctttggcaagcagctaatccccttcatgctggtcatgaaactctctggagaccagcggctcgtcaacatcgcctatgacctcgccataaaactcaagtgggatcgctggcggcaggacccccaaaccttctattgcgtcaccccagaaaagatggcagtcggacagcattttcgtcagtaccgggaccagttacaaacagcactggcagtggacctctggtcctccttccttaaagcgaaccctcacgtgcacgaatgggccctcgaacactatgctctcactgaccctacagatctcacttttgaagaactcaagaagctgcctcatgtcaggggcacccctcgattcttagaactgtacatagtggggcacaacatcaatggctttgatgagatcgtcttggccgctcaggttatcaataaccgagcagaggttcctcagcctttcaaaatcacccgaaatttcatgcccagggccggcaagatcctcttcaatgatgttactttcgctttgcccaaccccgcctacaagaagcgggtggacttccaactctgggaacagggggcctgtgatgacatcgacttcaagtatcaattcctcaaagtcatggtcagggacacttttgccctcactcatacctcgctgcgcaatgcagcccaagcatactctctcccagtggagaagggatgctgtccctacaaggcagtcaatcagttctacatgttgggctcttaccgtgcagaaaaagacgggtttcccctcgaagagtactggaaggatcacgaagaataccttctcaaccgcgagctgtgggaaaagaaaagccaaccgcgttatgacatcatccaggaaactctcgactactgtgccctggatgtactcatcaccgccgagctggtagccaagctgcaagagtcatatgcccacttcataagggactctgtaggcttacctcatgcccattttaacatattccagagacctactatctcttccaattcccatgccatctttcgccagatcgtttacagggcggaaaaacccaaccgcaccaatctgggcccgggtcttcttgccccctcacatgaactctatgactatgtgcgagcaagcatcagaggggggcgatgttatcccacttacatcggcatcctcgaagagcccctctatgtctacgatatctgtggcatgtatgcctccgcgctcacccaccccatgccctggggcacccctcttaacccctatgagcgcgcgctggcagttcgagaatggcagatgaccttggatgatcccgccaccatcagctattttgacaaagatttgctaccgggaatatttaccatagatgcggacccccctgatgagttcatgctagaccccctcccccctttctgttcaagaaaaggaggtcgactctgctggaccaatgagcccctccgaggcgaggtggccaccagtgtggatctgataaccctgcacaataggggatggcgaatcagaatagttccggatgaactgacaaccatctttcctgaatggaaatgtgtggcgcgcgagtacgtccagcttaacatcaccgccaaggagcgcgcggacaaggaaaagaaccaaaccatgcgctccatcgccaagcttctatccaatgccctctatggatcatttgccaccaagctggacaacaagaagattgtgttttctgaccagatggacgagagtcttatgaaaggcatctctgctggtactgtcaatatcaaatcctcctcgttcctagaaactgacaacctgagtgcagaggtcatgcccgccttcgagagggaatacctaccccaacagctggcgctcctggacagcgatccggaagacagtgaggacgaacagaggcccgcccccttttatacccccccggcggggacccctggtcacgtggcctacacttacaagccaatcacattcttggatgtggaggagggggacatgtgtttacataccgtagagaaggtggaccccctggttgacaacgaccgctacccctcccacgtggcctcctttgtgctggcctggacacgcgcttttgtatcagagtgggctgggttcctctacgaagaggaccgaggcactccgctcgaggacaggcccataaagtcggtctacggggacacggacagcctctttgtcacccagcggggacacgaactcatggaaaccaaaggtaagaaacgcatcaaaaaacatggcggaaaacttgtttttgaccccgatgagccggatctgacctggctcgtggagtgcgaaaccgtctgcgcctcctgcggtgcggatgcatactcccccgaatccattttcctcgcgcccaagttgtatgccctcaaatgtatctactgccccgcctgccataaaacttccaaaggtaagctccgtgccaaaggccacgcggccgaggcgctcaactacgaactcatggtaaactgctacctggccgacatgcagggcgccaatcggcagcggttctcgaccagcaggatgagtctgaagcgcaccctcgcaagcgcccaaccaggcgcgcaccccttcaccgtgacggaaacaaccctgactcggacgctgcgaccatggaaggatcggaccctggcagcgctggacgcccatcgtctgattccctactccaggagccgtcccaacccgcgaaacgaggaggtctgctggatcgagatgccatagagcacatcaccgagctctgggaccggctcgagctcttgcaacagactctttccaaaatgcccatggctgacgggctgaagccgctgaaaaacttctcctcgctccaggagcttctatcccttgggggagagcgcctcctaacggacttggtgcgggaaaatatccatgtaagggaaatgatgaacgaagtggcccccctgctccgggaggacggcagctgtcgttccctaaactaccatctgcaacccgtaattggggtcatttacggtcccactgggtgcggcaagtctcagctgcttaggaatttgctctcgtcccagttaatcaccccggctccagaaacggtattttttatagccccgcaggtggacatgatccccccctctgaactgaaagcctgggaaatgcaaatatgtgagggaaactatgctcccgggccagagggaactttcatcccccaatctggcaccctccgcccaaagtttattaaaatggcttatgatgacctgactcaggagcataactatgatgtttcagacccccggaacgtgttcgcccgtgccgctgcccacggccccatcgctatcattatggatgagtgcatggagaatctggggggtcacaaaggcgtctccaaattttttcatgcttttccctctaagctgcatgataaatttcccaagtgcaccggatacactgtcttggtggtcctgcacaatatgaacccgagacgggatctaggcggcaacattgccaacctcaagatccagtccaaaatgcatataatttcaccccggatgcacccgtcccagctcaacagatttgtaaacacctacactaagggcctccccgttgcaattagtctgctcctaaaagatattgtgcaacaccatgcactccgaccttgctatgactgggtgatttataacactaccccggagcaagaggctcttcaatggagctatctccacccccgagacggactaatgcccatgtatctaaacattcaatcccacctttacagggtactggaaaagatccaccgcgttctcaatgatcgagaccgatggtccagggcataccgcgcgcgaaaaatcaaataaa

SEQ ID NO: 6 - DNA, 4102 bp, Human mastadenovirus B
tataaaacgcctggtgattagaggccgaggtatccagctcaacgacgagtcggttagctcttcgcttggtctgcgaccagacggagtcttccaaatcgccggctgtgggagatcttccttcactcctcgtcaggctgtgctgactttggagagttcgtcctcgcagccccgctcgggcggcattggaactctccagtttgtggaggagtttactccctctgtctacttcaaccccttctccggctctcctggccagtacccggacgagttcataccaaacttcgacgcaatcagcgagtcagtggatggctatgattgatgtctaatggtggtgcggctgagctagctcgactgcgacacctagaccactgccgccgctttcgctgcttcgcccgggaactcaccgagttcatctacttcgaactctccgaggagcaccctcagggtccggcccacggagtgcggattaccatcgaagggggaatagactctcgcctgcatcgcatcttctcccagcggcccgtgctaattgaacgcgaccagggaaatacaaccatctccatctactgcatctgtaaccaccccggattgcatgaaagcctttgctgtcttgtttgtgctgagtttaataaaaactgagttaagaccctcctacggactaccgcttcttcaatcaggactttacaacaccaaccagatcttccagaagacccagacccttcctcctttcatccaggactctaactctaccttaccagcaccctccactactaaccttcccgaaacaaacaagcttgcatctcatctgcaacaccgcctttcacgaagccttctttctgccaatactaccactcccaaaaccggaggtgagctccgcggtcttcctactgacgacccctgggtggtagcgggttttgtaacgttaggagtagttgcgggtgggcttgtgctgatcctttgctacctatacacaccttgctgtgcatatttagtcatattgtgctgttggtttaagaaatgggggccatactagtcgtgcttgctttactttcgcttttgggtctgggctctgctaatctcaatcctctcgatcacgatccatgtttagacttcgacccagaaaactgcacacttacttttgcacccgacacaagccgtctctgtggagttcttattaagtgcggatgggactgcaggtccgttgaaattacacataataacaaaacatggaacaataccttatccaccacatgggagccaggagttccccagtggtatactgtctctgtccgaggtcctgacggttccatccgcattagtaacaacactttcattttttctgaaatgtgcgatctggccatgttcatgagcagacagtatgacctatggcctcccagcaaagagaacattgtggcattttccattgcttattgcttggtaacatgcatcatcactgctatcatttgtgtgtgcatacacttgcttatagttattcgccctagacaaagcaatgaggaaaaagagaaaatgccttaacctttttcctcataccttttctttacagcatggcttctgttacagctctaattattgccagcattgtcactgtcgctcacgggcaaacaattgtccatattaccttaggacataatcacactcttgtagggcccccaattacttcagaggttatttggaccaaacttggaagtgttgattattttgatataatttgcaacaaaactaaaccaatatttgtaatctgtaacagacaaaatctcacgttaattaatgttagcaaaatttataacggttactattatggttatgacagatccagtagtcaatataaaaattacttagttcgcataactcagcccaaattaacagtgccaactatgacaataattaaaatggctaataaagcattagaaaattttacatcaccaacaacacccaatgaaaaaaacattccaaattcaatgattgcaattattgcggcggtggcattgggaatggcactaataataatatgcatgctcctatatgcttgttactataaaaagtttcaacataaacaggatccactactaaattttaacatttaattttttatacagatgatttccactacaatttttatcattactagccttgcagctgtaacttatggccgttcacacctaactgtacctgttggctcaacatgtacactacaaggaccccaagaaggctatgtcacttggtggagaatatatgataatggagggttcgctagaccatgtgatcagcctggtacaaaattttcatgcaacggaagagacttgaccattattaacataacatcaaatgagcaaggcttctattatggaaccaactataaaaatagtttagattacaacattattgtagtgccagccaccacttctgctccccgcaaatccactttctctagcagcagtgccaaagcaagcacaattcctaaaacagcttctgctatgttaaagcttccaaaaatcgctttaagtaattccacagccgctcccaatacaattcctaaatcaacaattggcatcattactgccgtggtagtgggattaatgattatatttttgtgtataatgtactacgcctgctgctatagaaaacatgaacaaaaaggtgatgcattactaaattttgatatttaattttttatagaattatgatattgtttcaatcaaataccactacctcctatgcatacacaaacattcagcctaaatacgctatgcaactagaaatcacaatactaattgtaattggaattcttatactatctgttattctttattttatattctgccgtcaaatacccaatgttcatagaaattctaaaagacgtcccatctattctcctatgattagtcgtccccatatggctctgaatgaaatctaagatctttttttttttctcttacagtatggtgaacatcaatcatgatccctagaaatttcttcttcaccatactcatctgtgcttttaatgtctgtgctactttcacagcagtagccactgcaagcccagactgtataggaccatttgcttcctatgcactttttgccttcgttacttgcatctgcgtgtgtagcatagtctgcctggttattaattttttccaactggtagactggatctttgtgcgaattgcctacctacgtcaccatcccgaataccgcaatcaaaatgttgcggcacttcttaggcttatttaaaaccatgcaggctatgctaccagtcattttaattttgctactaccctgcattcccctagcttccaccgccactcgcgctacacctgaacaacttagaaaatgcaaatttcaacaaccatggtcatttcttgattgctaccatgaaaaatctgattttcccacatactggatagtgattgttggaataattaacatactttcatgtacctttttctcaatcacaatataccccacatttaattttgggtggaattctcccaatgcactgggttacccacaagaaccagatgaacatattccactacaacacatacaacaaccactagcactggtacagtatgaaaatgagccacaaccttcactgccccctgccattagttacttcaacctaaccggcggagatgactgacccaatcgccacatcatccaccgctgccaaggagctgctggacatggacggacgtgcctcagaacagcgactcatccaactacgcattcgtcagcagcaggaacgagcagtaaaagagctaagggatgccattgggattcaccagtgcaaaaaaggcatattctgcttagtaaaacaatccaaaatctcctacgagatcaccgctactgaccatcgtctctcatacgagctcggtccgcagcgacaaaaattcacctgcatggtgggaatcaaccccatagttatcacccagcagtctggagatactaagggttgtatccagtgttcctgtgattccaccgagtgcatctacacactgctgaagaccctctgcggccttcgagacctcctacccatgaactaatcattgcccctaccttacccaatcaaaatattaataaa

SEQ ID NO: 7 - DNA, 960 bp, Human mastadenovirus B
atggccaagcgagctcggctaagcacttccttcaacccggtgtacccttatgaagatgaaagcagctcacaacacccatttataaatcctggtttcatttcccctgacgggttcacacaaagtccaaacggggttttaagtcttaaatgtgttaatccacttaccactgcaagcggctccctccaacttaaagtgggaagtggtcttacagtagacactactgatggatccttagaagaaaacatcaaagttaacacccccctaacaaagtcaaaccattctataaatttaccaataggaaacggtttgcaaatagaacaaaacaaactttgcagtaaactcggaaatggtcttacatttgactcttccaattctattgcactgaaaaataacactttatggacaggtccaaaaccagaagccaactgcataattgaatacgggaaacaaaacccagatagcaaactaactttaatccttgtaaaaaatggaggaattgttaatggatatgtaacgctaatgggagcctcagactacgttaacaccttatttaaaaacaaaaatgtctccattaatgtagaactatactttgatgccactggtcatatattaccagactcatcttctcttaaaacagatctagaactaaaatacaagcaaaccgctgactttagtgcaagaggttttatgccaagtactacagcgtatccatttgtccttcctaatgcgggaacacataatgaaaattatatttttggtcaatgctactacaaagcaagcgatggtgccctttttccgttggaagttactgttatgcttaataaacgcctgccagatagtcgcacatcctatgttatgacttttttatggtccttgaatgctggtctagctccagaaactactcaggcaaccctcataacctccccatttaccttttcctatattagagaagatgactga

SEQ ID NO: 8 - DNA, 126 bp, Human mastadenovirus B
atggccaagcgagctcggctaagcacttccttcaacccggtgtacccttatgaagatgaaagcagctcacaacacccatttataaatcctggtttcatttcccctgacgggttcacacaaagtcca

SEQ ID NO: 9 - DNA, 270 bp, Human mastadenovirus B
aacggggttttaagtcttaaatgtgttaatccacttaccactgcaagcggctccctccaacttaaagtgggaagtggtcttacagtagacactactgatggatccttagaagaaaacatcaaagttaacacccccctaacaaagtcaaaccattctataaatttaccaataggaaacggtttgcaaatagaacaaaacaaactttgcagtaaactcggaaatggtcttacatttgactcttccaattctattgcactgaaaaataacact

SEQ ID NO: 10 - DNA, 561 bp, Human mastadenovirus B
ttatggacaggtccaaaaccagaagccaactgcataattgaatacgggaaacaaaacccagatagcaaactaactttaatccttgtaaaaaatggaggaattgttaatggatatgtaacgctaatgggagcctcagactacgttaacaccttatttaaaaacaaaaatgtctccattaatgtagaactatactttgatgccactggtcatatattaccagactcatcttctcttaaaacagatctagaactaaaatacaagcaaaccgctgactttagtgcaagaggttttatgccaagtactacagcgtatccatttgtccttcctaatgcgggaacacataatgaaaattatatttttggtcaatgctactacaaagcaagcgatggtgccctttttccgttggaagttactgttatgcttaataaacgcctgccagatagtcgcacatcctatgttatgacttttttatggtccttgaatgctggtctagctccagaaactactcaggcaaccctcataacctccccatttaccttttcctatattagagaagatgac

SEQ ID NO: 11 - DNA, 1635 bp, Human mastadenovirus B
atgaggagacgagccgtgctaggcggagcggtggtgtatccggagggtcctcctccttcttacgagagcgtgatgcagcaacaggcggcgatgatacagcccccactggaggctcccttcgtacccccacggtacctggcgcctacggaagggagaaacagcattcgttactcggagctgtcgcccctgtacgataccaccaagttgtatctggtggacaacaagtcggcggacatcgcctccctgaactatcagaacgaccacagcaacttcctgaccacggtggtgcagaacaatgactttacccccacggaggctagcacccagaccatcaactttgacgagcggtcgcgatggggcggtcagctgaagaccatcatgcacaccaacatgcccaacgtgaacgagtacatgttcagcaacaagttcaaggcgagggtgatggtgtccagaaaagctcctgaaggtgttacagtaaatgacacctatgatcataaagaggatatcttgaagtatgagtggtttgagttcattttaccagaaggcaacttttcagccaccatgacgatcgacctgatgaacaatgccatcattgacaactacctggaaattggcagacagaatggagtgctggaaagtgacattggtgttaagtttgacactagaaatttcaggctcgggtgggaccccgaaactaagttgattatgccaggtgtctacacttatgaggcattccatcctgacattgtattgctgcctggttgcggggtagactttactgaaagccgacttagcaacttgcttggcatcaggaagagacatccattccaggagggtttcaaaatcatgtatgaagatcttgaagggggtaatattcctgcccttttggatgtcactgcctatgaggaaagcaaaaaggataccactactgaaacaaccacactggctgttgcagaggaaactagtgaagatgatgatataactagaggagatacctatataactgaaaaacaaaaacgtgaagctgcagctgctgaagttaaaaaagagttaaagatccaacctctagaaaaagacagcaagagtagaagctacaatgtcttggaagacaaaatcaacacagcctaccgcagttggtacctgtcctacaattacggtaaccctgagaaaggaataaggtcttggacactgctcaccacttcagatgtcacctgtggggcagagcaggtctactggtcgctccctgacatgatgcaagacccagtcaccttccgctccacaagacaagtcaacaactacccagtggtgggtgcagagcttatgcccgtcttctcaaagagtttctacaatgagcaagccgtgtactctcagcagctccgacaggccacttcgctcacgcacgtcttcaaccgcttccctgagaaccagatcctcatccgcccgccggcgcccacaattaccaccgtcagtgaaaacgttcctgctctcacagatcacgggaccctgccgttacgcagcagtatccggggagtccagcgcgtgaccgttactgacgccagacgccgcacctgtccctacgtttacaaggccctgggcatagtcgcgccgcgcgttctttcaagccgcactttctaa

SEQ ID NO: 12 - DNA, 2835 bp, Human mastadenovirus B
atggccaccccatcgatgatgccccaatgggcatacatgcacatcgccggacaggatgcttcggagtacctcagtccgggtctggtgcagttcgcccgtgcaacagacacctacttcagtatggggaacaaatttagaaaccccacagtggcgcccacccacgatgtgaccaccgaccgtagccagcgcctgatgctgcgcttcgtgcccgttgaccgggaagacaatacctactcttacaaagttcgctacacgctggctgtaggcgacaacagagtgcttgacatggccagcacattctttgacattcggggggtgcttgatagaggtcctagcttcaagccatattccggcacagcttacaattcactcgctcctaagggcgcgcccaatacatctcagtggatagttacaacaaatggggacaatgcagtaactaccaccacaaacacatttggcattgcttccatgaagggagacaatattactaaagaaggtttgcaaattgggaaagacattaccactactgaaggagaagaaaagcccatttatgccgataaaacatatcagccagagcctcaagttggagaagaatcatggactgatactgatggaacaaatgaaaagtttggtggaagagcccttaaaccagctaccaacatgaagccatgctacgggtcttttgcaagacctacaaacataaaagggggccaagctaaaaacagaaaagtaaaaccaacaaccgaaggaggggttgaaactgaggaaccagatattgatatggaatttttcgatggtagagatgctgttgcaggagctttagcgcctgaaattgtgctttatacggaaaatgtaaatttggaaactccagacagtcatgtggtatataaaccagaaacgtctaataactctcatgcaaatttgggtcaacaagccatgcctaacagacccaattacattggcttcagggataacttcgtaggcctaatgtactacaacagtactggaaatatgggagttttggctggccaagcatcacaactgaatgcagtggttgacttgcaggacagaaatactgaactgtcatatcagcttttgcttgattctctgggagacagaaccagatacttcagcatgtggaatcaggctgtggacagttacgatcccgatgttcgcattattgaaaatcatggcatcgaggatgaactgcctaattactgttttcctctgaatggcataggaccagggcacacatatcaaggcattaaagttaaaaccgatgacactaatggatgggaaaaagatgctaatgttgctccagctaatgaaataaccataggcaacaacctggctatggaaattaatatccaagctaacctttggagaagttttctgtactctaatgtggctttgtaccttccagatgtttacaagtacacgccacctaacattactttgcccactaacaccaacacctatgagtacatgaacgggcgagtggtatccccatccctggttgattcatacatcaacattggcgccaggtggtctcttgacccaatggacaatgtgaatccattcaaccaccaccgcaatgctggtctgcgctacaggtccatgcttctgggaaatggtcgttatgtgcctttccacatacaagtgcctcagaaattctttgctgtcaagaacctacttcttctacctggctcctacacctacgagtggaacttccgaaaggatgtgaacatggtcctgcaaagttcccttggaaatgacctcagaacggatggtgctaccataagtttcaccagcatcaatctctatgccaccttcttccccatggctcacaacacagcttccacccttgaagccatgctgcgcaacgataccaatgatcagtcatttaacgactacctctctgcagctaacatgctttaccccattcctgccaatgcaaccaacattccaatttccatcccatctcgcaactgggcagccttcaggggctggtccttcaccagactcaaaaccaaggagactccatctcttggatcagggttcgatccctacttcgtatattctggatctattccctacctggatggcaccttttaccttaaccacactttcaagaaggtctccatcatgtttgactcctcagtcagctggcctggcaatgacaggctgttgagtccaaatgagtttgaaatcaagcgcactgtggacggggaaggatacaacgtggcacaatgcaacatgaccaaagactggttcctggttcagatgcttgccaattacaacattggctaccagggcttttacatccctgagggatacaaggatcgcatgtactcctttttcagaaacttccagcctatgagcaggcaggtggttgatgaggttaattacactgactacaaagccgtcaccttaccataccaacacaacaactctggctttgtagggtaccttgcacctactatgagacaaggggaaccttacccagccaattatccatacccgctcatcggaactactgccgttaagagtgtcacccagaaaaagttcctgtgcgacaggaccatgtggcgcattcccttctccagcaacttcatgtccatgggggcccttaccgacctgggacagaacatgctctatgccaactcagcccatgcgctggacatgacttttgaggtggatcccatggatgagcccaccctgctttatcttcttttcgaagtcttcgacgtggtcagagtgcaccagccacaccgcggcgtcatcgaggccgtctacctgcgcacaccgttctcggccggcaacgccaccacataa

SEQ ID NO: 13 - protein, 319 aa, Human mastadenovirus B
MAKRARLSTSFNPVYPYEDESSSQHPFINPGFISPDGFTQSPNGVLSLKCVNPLTTASGSLQLKVGSGLTVDTTDGSLEENIKVNTPLTKSNHSINLPIGNGLQIEQNKLCSKLGNGLTFDSSNSIALKNNTLWTGPKPEANCIIEYGKQNPDSKLTLILVKNGGIVNGYVTLMGASDYVNTLFKNKNVSINVELYFDATGHILPDSSSLKTDLELKYKQTADFSARGFMPSTTAYPFVLPNAGTHNENYIFGQCYYKASDGALFPLEVTVMLNKRLPDSRTSYVMTFLWSLNAGLAPETTQATLITSPFTFSYIREDD

SEQ ID NO: 14 - protein, 90 aa, Human mastadenovirus B
NGVLSLKCVNPLTTASGSLQLKVGSGLTVDTTDGSLEENIKVNTPLTKSNHSINLPIGNGLQIEQNKLCSKLGNGLTFDSSNSIALKNNT

SEQ ID NO: 15 - protein, 186 aa, Human mastadenovirus B
WTGPKPEANCIIEYGKQNPDSKLTLILVKNGGIVNGYVTLMGASDYVNTLFKNKNVSINVELYFDATGHILPDSSSLKTDLELKYKQTADFSARGFMPSTTAYPFVLPNAGTHNENYIFGQCYYKASDGALFPLEVTVMLNKRLPDSRTSYVMTFLWSLNAGLAPETTQATLITSPFTFSYIREDD

SEQ ID NO: 16 - protein, 544 aa, Human mastadenovirus B
MRRRAVLGGAVVYPEGPPPSYESVMQQQAAMIQPPLEAPFVPPRYLAPTEGRNSIRYSELSPLYDTTKLYLVDNKSADIASLNYQNDHSNFLTTVVQNNDFTPTEASTQTINFDERSRWGGQLKTIMHTNMPNVNEYMFSNKFKARVMVSRKAPEGVTVNDTYDHKEDILKYEWFEFILPEGNFSATMTIDLMNNAIIDNYLEIGRQNGVLESDIGVKFDTRNFRLGWDPETKLIMPGVYTYEAFHPDIVLLPGCGVDFTESRLSNLLGIRKRHPFQEGFKIMYEDLEGGNIPALLDVTAYEESKKDTTTETTTLAVAEETSEDDDITRGDTYITEKQKREAAAAEVKKELKIQPLEKDSKSRSYNVLEDKINTAYRSWYLSYNYGNPEKGIRSWTLLTTSDVTCGAEQVYWSLPDMMQDPVTFRSTRQVNNYPVVGAELMPVFSKSFYNEQAVYSQQLRQATSLTHVFNRFPENQILIRPPAPTITTVSENVPALTDHGTLPLRSSIRGVQRVTVTDARRRTCPYVYKALGIVAPRVLSSRTF

SEQ ID NO: 17 - protein, 944 aa, Human mastadenovirus B
MATPSMMPQWAYMHIAGQDASEYLSPGLVQFARATDTYFSMGNKFRNPTVAPTHDVTTDRSQRLMLRFVPVDREDNTYSYKVRYTLAVGDNRVLDMASTFFDIRGVLDRGPSFKPYSGTAYNSLAPKGAPNTSQWIVTTNGDNAVTTTTNTFGIASMKGDNITKEGLQIGKDITTTEGEEKPIYADKTYQPEPQVGEESWTDTDGTNEKFGGRALKPATNMKPCYGSFARPTNIKGGQAKNRKVKPTTEGGVETEEPDIDMEFFDGRDAVAGALAPEIVLYTENVNLETPDSHVVYKPETSNNSHANLGQQAMPNRPNYIGFRDNFVGLMYYNSTGNMGVLAGQASQLNAVVDLQDRNTELSYQLLLDSLGDRTRYFSMWNQAVDSYDPDVRIIENHGIEDELPNYCFPLNGIGPGHTYQGIKVKTDDTNGWEKDANVAPANEITIGNNLAMEINIQANLWRSFLYSNVALYLPDVYKYTPPNITLPTNTNTYEYMNGRVVSPSLVDSYINIGARWSLDPMDNVNPFNHHRNAGLRYRSMLLGNGRYVPFHIQVPQKFFAVKNLLLLPGSYTYEWNFRKDVNMVLQSSLGNDLRTDGATISFTSINLYATFFPMAHNTASTLEAMLRNDTNDQSFNDYLSAANMLYPIPANATNIPISIPSRNWAAFRGWSFTRLKTKETPSLGSGFDPYFVYSGSIPYLDGTFYLNHTFKKVSIMFDSSVSWPGNDRLLSPNEFEIKRTVDGEGYNVAQCNMTKDWFLVQMLANYNIGYQGFYIPEGYKDRMYSFFRNFQPMSRQVVDEVNYTDYKAVTLPYQHNNSGFVGYLAPTMRQGEPYPANYPYPLIGTTAVKSVTQKKFLCDRTMWRIPFSSNFMSMGALTDLGQNMLYANSAHALDMTFEVDPMDEPTLLYLLFEVFDVVRVHQPHRGVIEAVYLRTPFSAGNATT

SEQ ID NO: 18 - protein, 42 aa, Human mastadenovirus B
MAKRARLSTSFNPVYPYEDESSSQHPFINPGFISPDGFTQSP

SEQ ID NO: 19 - DNA, 136 bp, Unknown
  Description of Unknown: Human adenovirus 7 sequence
ctctctatttaatataccttatagatggaatggtgccaatatgtaaatgaggtaatttaaaaaagtgcgcgctgtgtggtgattggctgtggggttaacggctaaaatgggcggggcggccgtgggaaaatgacgt

SEQ ID NO: 20 - DNA, 136 bp, Unknown
  Description of Unknown: Human adenovirus 7 sequence
acgtcattttcccacggccgccccgcccattttagccgttaaccccacagccaatcaccacacagcgcgcacttttttaaattacctcatttacatattggcaccattccatctataaggtatattatatagagag

SEQ ID NO: 21 - DNA, 343 bp, Unknown
  Description of Unknown: Human adenovirus 7 sequence
gacttatgtgggaggagctatgttgcaagttattgcggtaaatgtgacgtaaaacgaggtgtggtttgaacacggaagtagacagttttcccacgcttactgacaggatatgaggtagttttgggcggatgcaagtaaaaattctccattttcgcgcgaaaactgaatgaggaagtgaatttctgagtcatttcgcggttatgacagggtggagtatttgccgagggccgagtagactttgaccgtttacgtggaggtttcgattaccgtgtttttcacctaaatttccgcgtacggtgtcaaagtcctgtgtttttacgtaggtgtcagctgatcgctaggg

SEQ ID NO: 22 - DNA, 3440 bp, Unknown
  Description of Unknown: Human adenovirus 7 sequence
tatttaaacctgacgagttccgtcaagaggccactcttgagtgccagcgagaagagttttctccttcgcgccgcaagtcagttctgcgctttgaaaatgagacacctgcgtttcctgccacaggagattatcttcagtgagaccgggatcgaaatactggagtttgtggtaaataccctaatgggagacgacccggaaccgccagtgcagcctttcgatccacctacgctgcacgatctgtatgatttagaggtagacgggcctcaggatcccaatgaggaagctgtgaatgggttttttactgattctatgctgctagctgccgatgaaggattggacataaaccctcctcctgagacccttgttaccccaggggtggttgtggaaagcggcagaggtgggaaaaaattgcctgatctgggagcagctgaaatggacttgcgttgttatgaagagggttttcctccgagtgatgatgaagatggggaaactgagcagtccatccataccgcagtgaatgagggagtaaaagctgccagcgatgtttttaagttggactgtccggagctgcctggacatggctgtaagtcttgtgaatttcacaggaataacactggaatgaaagaactattgtgctcgctttgctatatgagaatgcactgccactttatttacagtaagtgtatttaagtgaaatttaaaggaatagtgtagctgtttaataactgttgaatggtagatttatgttttttacttgtgattttttgtaggtcctgtgtctgatgatgagtcaccttctcctgattcaactacctcacctcctgaaattcaggcgcccgcacctgcaaacgtatgcaagcccattcctgtaaagcctaagcctgggaaacgccctgctgtggataagcttgaggacttgttggagggtggggatggacctttggaccttagtacccggaaactgccaaggcaataagtgccctgcagctgtgtttatttaatgtgacgtcatgtaataaaattatgtcagctgctgagtgttttattacttcttgggtggggacttggatatataagtaggagcagatctgtgtggttagctcacagcaacctgctgccatccatggaggtttgggctatcttggaagacctcagacagactaggctactgctagaaaacgcctcggacggagtctctggcctttggagattctggttcggtggtgatctagctaggctagtgtttaggataaaacaggactacagcgtagaatttgaaaagttattggacgacagtccaggactttttgaagctcttaacttgggtcatcaggctcattttaaggagaaggttttatcagttttagatttttctactcctggtagaactgctgctgctgtagcttttcttacttttatattggataaatggatccgccaaactcacttcagcaagggatacgttttggatttcatagcagcagctttgtggagaacatggaaggctcgcaggatgaggacaatcttagattactggccagtgcagcctctaggagtagcagggatactgagacacccaccgaccatgccagcggttctgcaggaggagcagcaggaggacaatccgagagccggcctggaccctccggtggaggagtagctgacctgtttcctgaactgcgacgggtgcttactaggtctacgaccagtggacagaacagaggcattaagagggagaggaatcctagtgggaataattcaagaaccgagttggctttaagtttaatgagccgcaggcgtcctgaaactgtttggtggcatgaggttcagagcgaaggcagggatgaagtttcaatattgcaggagaaatattcactagaacaacttaagacctgttggttggaacctgaggatgattgggaggtggccattaggaattatgctaagatatctctgaggcctgataaacaatatagaattactaagaagattaatattagaaatgcatgctacatatcagggaatggggcagaggttataatagatacacaagataaagcagcttttagatgttgtatgatgggtatgtggccaggggttgtcggcatggaagcagtaacacttatgaatattaggtttagaggggatgggtataatggcattgtatttatggctaacactaagctgattctacatggttgtagcttttttgggtttaataatacgtgtgtagaagcttgggggcaagttagtgtgaggggttgtagtttttatgcatgctggattgcaacatcaggtagggtcaagagtcagttgtctgtgaagaaatgcatgtttgagagatgtaatcttggcatactgaatgaaggtgaagcaaggatccgccactgcgcagctacagaaactggctgcttcattctaataaagggaaatgccagtgtgaagcataatatgatctgtggacattcggatgagaggccttatcagatgctgacctgcgctggtggacattgcaatattcttgctactgtgcatatcgtttcacatgcacgcaagaaatggcctgtatttgaacataatgtgattaccaagtgcaccatgcacataggtggtcgcaggggaatgtttatgccttaccagtgtaacatgaatcatgtgaaggtaatgttggaaccagatgccttttccagagtgagcttaacaggaatctttgatatgaatattcaactatggaagatcctgagatatgatgacactaaaccgagggtgcgcgcatgcgaatgcggaggcaagcatgctagattccagccggtgtgcgtggatgtgactgaagacctgagacccgatcatttggtgcttgcctgcactggagcggagttcggttccagtggtgaagaaactgactaaagtgagtagtgggggcaagatgtggatggggactttcaggttggtaaggtggacagattgggtaaattttgttaatttctgtcttgcagctgccatgagtggaagcgcttcttttgaggggggagtatttagcccttatctgacgggcaggctcccaccatgggcaggagttcgtcagaatgtcatgggatccactgtggatgggagacccgtccagcccgccaattcctcaacgctgacctatgccactttgagttcgtcaccattggatgcagctgcagccgccgccgctactgctgccgccaacactatccttggaatgggctattacggaagcatcgttgccaattccagttcctctaataacccttcaaccctggctgaggacaagctacttgttctgttggctcagctcgaggccttaacccaacgcttaggcgaactgtctaagcaggtggcccagttgcgtgagcaaactgagtctgctgttgctacagcaaagtctaaataaagatctcaaatcaataaataaa

SEQ ID NO: 23 - DNA, 22921 bp, Unknown
  Description of Unknown: Human adenovirus 7 sequence
tttaagagtcagcgcgcagtacttgttgaagagagcctcggcgtcctcgagagtgcgctgaagttggtcttcgctcttgtgatacaaacaacttctggtgagcgagcgcagagatcggttttttactttcagttcctgctcttgcccccgactctgctggaagatggcatagagggttggaaagatccggttcctcagctctctggtctgcgctggctcgttcgctgtgatcctcagtcctcctcctgctgcacttgttgtagattttctaactgctggttttctggtcaccgttgtcgctgctgtctttttctgtcggggttgccgggacttgctgactgcagtaggggctgtggaggtgacggtagtaatgcaagatattgcgggggaagttcacaccgtggtggaagagcaggtatcgccgggtgaaggatatgttgcccccgcattcatgcaagcaggagatgatagcgtttttatgtccacgccaggacttgtatccctgtcgctccttcttaccggtcttggaagcggtggtcgggtttgggaatcgcccggtctcgtcccatctactgttgggccgccgctggaccccccgacccggagcggagatggtagccgtgctgctgtctggggacttgcttgtctccgccgccgatgacaactgtttggcggcggttgcttcttccacctcctctgcctcctcgtcttcctcctccaaactgtcttcctccaggctgtccacctcctctgcctggctgtcccaatcttccatctcctcctctgcctgactgtcccagtcttcctccatatcctctgggggcgtcagctgcaccttcagcttcttgcttcctcggcgatgggacatcctgggggaaccttgtgttgagctcctcaccggtctgggggtcaaggtagaccccgcttccctttttcagtagaaattcttggcgggatttttggatggcttgcaattgggccagaattgctccctgggtgatgacgcaggctgagagctcgactttgggaggatgtgactggtcctcatagaacctgatctcataggggtggtaatcctcgggatgaaacttgcgcaggtaggcggaggtccacagccccggtgtcagtttcagactctgccccggagaagacccctcgccttcactgctgggaccctgcaactcgaaggtgccgatgatctgggtctcgctcagcaactgggggttgcaggcaagggagcggtggggtgtgcaaagattgcagcggcagtggcattccagcagaccgtctccgctcacatcctctataacatccgagtggtaggagaggtagttggccaggcggaacaggtagcagtggctccatagcggcggtgggcactcgcggtaggtgagaggcacaaagtcggagggcagcgcacagcaggtggcaggcaggataccggagcgttccaggatgaaagagcgaaagttgttaagcatgctctggctcataaagtctggcaggccgtttcgcagagtaaccctgagacgctcggggaagatgatgtctgccaggtccgaggcgacggtgcgctcatcaaaacctgtccacagggctttgagggatctctgcaagagcttgtccagctcttttaggttctgctcttccaaacactgttgccacacacccatgccagtctgccaggtatggcagaggtagaggtagacacagtctcggatgtagtcacggcgggcctcccctttaagggtggtgtgcaggacgctctgccctagccggttctcatgcaaaatgcccatgtaagaaaccaggttggtaagctccacgttggagatcttgcatgcctgccgcacgaagccatgtctaaaggtgtagtgcaggttctcctctagcttgcgcagggtctcggggtcggtgaaaaagcggcgcaaacactccagctccacagttactagcactacagccatcataagcttgcgcctctcttccaaatctcggggggagttggtacccagccagcgagatagctgctcgtcactgactaccggcttgccctcgtccgaggcgtctggatcctgcatgttctggttttctgaaagtggacctgctcgtttgatgagcagatggtccataacagcgctcataactttggggggcaggttaacagcggggtaggcaaaatgggtgaccacgatactgcgcttgagcactgcaagccgggcattgtcaccctccagttccactaaagcgctgtgatgttcatccatgccattctctccctgttgcagagcatttgcggcccgagtctcatcacttcccagaccctcaaagatttttggaacctcttccaaggaagctatatcaggtaagcgagctcccggacccaagttgagaagggcatcggcgcgggtgcggttggcgcggcaggagactggaatcttttggttcttaaaaaagatgtggtaggtggccagcacttcggggacagtaaaagctggatagaagttcagtcgagggttggcctcgcaggtgccgtttggctgccgcttggggggtatgtgaggcgaaaagaggttcagctcgtaggcgcggctaagctcttccacactgatgggcacttcggtgaggtcgagtagtgcgtctttaactatgttcgactgccttgctagatgtttgaggagcacgtcttcccccccaagcccggtgaggtagtcggcaacttgatccccgatgccagcctcctggtgatcgccatctgcttgatgctctgggcggtcgtcatcctctctgtctataaaacgtttcagctcctcctcgtgctccgccggtgtcacatagcccgggtcctgctcgacatctgcctcaatctcttccgctttcacattatcctgcgcctgcatctcctgggctgcgtcgacctcctcctcctcatcatcgagggtagaggtggtggtagctggactgggtggtggggtggttaagctctcctcctcgtcgctgctgggggcgaggtgtgatggcgcttgcagcgatgttggcagtgatggctgagtttccatgtctgttgtttctctgcctaggagaacacaatggccagccgcggaggaaatcagtcaagcgaccgccaacgggagcacacccccgaacgcggaatgggctctgccagccatccgcttccaaggccagaccgcagcccatctcagtcgcctccacctctgcccccgaagaggaacacctaccgtcgcgtggggtccgattcttctatcgagagccaggtggtactggtaagcgaaacttcgcggtcatccctgtctccggaacggagcaacagtcctcccccgatccctcccaagaagaagcccagaaagaccaagcatgtccctctgcaagacatcggccacgacagcgaagaagaaagagaacaggctcagttggtggccgtgggcttcagctaccccccggtgcgcatcattgagaaggatggcaagagaagtgttgagaagatcgacaagaatgaccctatagctaaaggagctacttctattgctgttaggaatcctttgagcttgcccctggtatctgcctgggagaagggcatggaagtgatggctgtgctaatggagaggtacaggctggataatgacctgagaacctctttcaagctgatgccagagcagcacgagcagtacaagcgtatctgccaccagtatgtgaacgaggagcaccgtggcatcccgctgacatttagtagcatgaagaccctgacagcgatgatgggaagattcatgcagggattggtacattcttattctgagatcgcccacaatagttgggagtgcaccgggtgcgctctgtgggctcatggatgcaccgattatgaaggcaaggtgaaatgcctgcatggcactatcatgattcagaaggaccacattatcgagatggatgtggcgagcgagaacggacagcgcgctatgaaggagaacccagacagagccaagatcacccagaaccgctggggcagaaatgtggtccagttggccaacaacgatgcccgctgctgtgtaaatgatgccaactgtgctactaatcaattttccagcaagtcctgtgggatgttctataccgagggaagtaaggctcaggaagctttcaagcagtacgaagccttcatgaaggccgtgtacccagggataacccccgaccaagccaggatgatgctgatccccattcattgcgattgcaaccacaagccaggctgcgctcccgtgatgggcaggcagacctgtaagatgaccccctttgggatggccaatgctgaagacttggatgtgactaccatcagtgacccgaccgtgctggcaagcgtgagacacccagccttgatggtgttccagtgttgcaacccagtgtaccgcaactcccgtgtccagaatgccggtcccaactgtgatttcaagatctctgctcctgacctacttggcgccctgcagctgaccagaaagttgtggcaagacacctttcccgagattccagttcccaagttggtgatccccgagttcaagtggcagaacaggttacagttccgcaacgtatccctgcccgcgggtcactttgactcccgccagaacccatttgatttctgagtgaataatgaaaacgaatgagtaaaaaacgagagccttagtgcatgtaaaaataaagtgctttttattgaacacggttttacatgacttattgcatatccatacggtcaaacgcggtggccctttcgatgcgtgcgcggtgagaacgaaagtaagatgagtgggtgtttaggaagcgatatagcgcctcctggttgcggcgcagggtgggctgcacttggggagattggagcatgctgttgggcaccccagtcagcaacttcatggtggggtttccgttcatggggcggtcgggccagtgcacaaaggcatgaaggaacatacagcaaaaaagtccacaggcggctgagcgtgggccctgcacgctctgggtggacttttccagggtgatgcagcggtctttggtagcaagggcactgcggcgcaggagcccctcgtactcaaactggtaaatctgtttgagtcgctcatccgagaacccaaaaggatcaaaaaggtagcaggtgttggagcgcgggttccaaccaaaagccagccagtgctctccccccgtctcgcgtccggcagtgttgactatggcgcaggcgagcttgtcgggggccatgaaccccgggaaacgcttgtcaaaggttcccaggaaatagggtccgcaacccaggtctcggacgatggctttgagctcttgctcgctggagccgtttccggacccgcatgacatggctgcagctgctgcttgcaagaagcaagaggcttcttatgtggtggcgttgccggccgagaacggtgtgcgcaggtagacggcctcgatgacgccgcggtgtggctggtgcactctgaccacgtcgaagacttcgaaaagaagataaagcagggtgggctcatccatgggatccacctcaaaagtcatgtccagcgcatgggccgagttggcatagagcaggttctgtcccaggtccgtaagggctcccatggacatgaagttgctggagaacggtatgcgccacatggtcctgtcgcacaggaactttttttgggtaacacttttaacggcagtagttccgatgagcgggtatggataattggctgggtaaggttccccttgtctcatagtaggcgcaaggtatcctacaaagccagagttgttgtgttgatatggtaaggtgacggctttgtagtcagtgtaattaacctcatcaaccacctgcctgctcataggctggaagtttctgaaaaaggagtacatgcgatccttgtatccctcagggatgtaaaagccctggtagccaatgttgtagttggcaagcatctgaaccaggaaccagtctttggtcatgttgcattgggccacattgtatccttccccatccacagtgcgcttgatttcaaactcatttggagacaacagcctgtcattgccaggccagctgactgaggagtcaaacatgatggagaccttcttgaaagtgtggttaaggtaaaaagtgccatccaggtagggaatagatccagaataaacgaagtagggatcgaaccctgatccaagagatggagtctccttggttttgagtctggtgaaggaccagcccctgaaggctgcccagttgcgagatgggatggaaattggaatgttggttgcattggcagggatggggtaaagcatgttagctgcagagaggtagtcgttgaatgactgatcattggtatcgttgcgcagcatggcttcaagagttgaagcggtgttgtgagccatggggaagaaggtggcatagaggttgatgctggtgaaacttatgttagcaccatctgttctgaggtcatttccaagggaactttgcaggaccatgttcacatcctttctgaagttccactcataggtgtaggagccaggtagaagaagtaggttcttgacagcaaagaatttttgaggcacttgtatgtggaaaggcacataacggccattgcccagaagcatggaccggtagcgtaggccagcattgcggtggtggttaaatggattcacattgtccattgggtcaagagaccacctggcgccaatgttgatgtatgaatcgaccagagatggggaaaccactcgcccgttcatgtactcataggtgttggtgttagcgggcagagtaatgttagttggcgtgtacttgtaaacatctggaaggtacaaagccacattggagtacagaaaacttctccaaagattagcttggatattaatttccatagccagattgttgcctatggctatttcattagctgtagaaactttagtatctttttcccatgcagtgtctctaggtttaatgccttgatatttgttccctggtcctatgccatccagaggaaaacagtaattaggcagttcatcctcgacgccatgattttcaataatacgaacatcgggatcatagctgtccacagcctgattccacatgctgaagtatctgcttctgtctcccagagaatcaagcaaaagctgatatgacagttcagtgtttctgtcctgcaagtcaaccactgcattcagttgtgatgcttggccggccaaaactcccatatttccagtactgttgtagtacataagacctacaaagttatccctgaagccaatgtaattgggtctgttaggcatggcttgttgacccaaatttgcatgagagttaccatcagaagttcctggcttgtataccacatggctgtctggagtttccaaattgacattttccgtgtaaagcacaatttcaggcgaaaaagcgtcagcagcttctctaccatcgaaaaattccatatcaatatctggctcctcagcttcaacatctccttcggttggtgttacttttctgtttttagcttggcccccttttatgtttgtaggtcttgcaaaagacccgtagcatggcttcattttagtagctggtttaagagctctacctccaaatttttcatttgttccatcaatatcagtccatgattcttctccaacttgaggctctggctgatatgttttatcggcataaatgggcttgttgtctgcagtaatgtctttcccaatttctaaaccttccttagtaatattgtctcccttcgtggaagcaatgccaaatgtgtatgtggtggcattgtcttctcccgttgtaactatccactgagatgtgttaggcgcgcccttaggagccagtgaattgtaagctgtgccggaatatggcttgaagctaggacctctatcaagcacccccctaatgtcaaagaatgtgctggccatgtcaagcactctgttgtcgcccacggcgagggtgtaccgcactttgtaagagtatgtattgtcctcccggtcaacgggcacgaagcgcagcatcagtcgctggctacggtcggtggtcacatcgtgggtgggcgccactgtggggtttctaaacttgttccccatactgaagtaggtgtctgttgcacgggcgaactgcaccagacccggactcaggtactccgaagcatcctgtccggcgatgtgcatgtatgcccattggggcatcatcgatggggtggccatcttgaaagcaactcagcctcggcgcgcgacctcttcctttctcctctgctgcggcggcgtggtgatgatacatacacacagacaagcaagttaagcgctactccatatttaattaatagcagcgacggcgctttacactctgcacgcccagacccacgatgctgttcagagtactttgccagtttgctttcgggcgcggtgtgcccccaggacgcggtctggctacggcaacgggctgtacggcggtgggctttctggtagcgacaggtttgggaacaggcgccgcagaagcagggggaggaggcaagtccaaggtggcgggtcgatgtaactcagaaggtttcatcaccccggtagccatgtgagctacgggcctggtagtgggcattccgagctttactgcctcctcgtatgaagggggctcgtctgcgcgcgtcaccagcgtgtgctctagctcgggtcgcggacgcttgtcgccccgcttttccagcggaggaagttcttcctccacttccatttcaccaggggttgcgggcggcgggtccaggcggctgtttatctgtttttgtacagcctggttggccagatccactacgccgttaataccagaggcgatcccatcgaccaccttctgttggaagttttgttccttaagcttatttctcagagcctgccctgtgctgctgttccaagctttgttcccataggtttttacggtcgagccaaaatttttaagcccgctccagatactgctccaattgaaggcgcccccgttcagttggctcgtgccgatgtcgctccaggtgcccatgtacggcctcgtgccgtgtcgcggagccagggatgaaaaattgatgtcttccatctctacaaaaacatagtcacaggaccaggagcgtcagagtccattctattttttatttataagtttttccaatgttagtggcgctgcgaggcctgaaccgccacggaagctatgcctggtatcgccccgatcgctgcggcgatgatgggtataagagctggcaaaaagccaccccctaatcgtctgctgatagcgcgccttcgtctgtggcggcgcatccctcgccccaacatccttctacggcgcgagtttcttcctcggtagccagtaatggggacgcgaaggcggcaagtgagggccatatctgcaaggaggcagcgtcaacagtcattaagtggtgatgcttggatggtagcgcgcgcgcggcagcgtcagaggttcagcgcgaccatcgcggtacactctccgcaccagggcggcgggagtcaatttgctggcagtgttgcggcggcggcgacggcgagtgcgacttgcaggtggtttgcggcggcgagaggtgttgctccggtttcgatagtagcgagtgcctctgtaacccggagtgggaatgatggatgggtgcagagcatagttgggcattagcagacttgctgggccgtactttcgtcgtgatcttcgagtggtgctgggggcggcaacgggcgcgggcatccagggttccgtttgcacctcaattgaggtggttgtgggttttgcaggttcggtctgcacttccatggactcggtgggaatcttgatgtcgaaggtttgtactcccaaacctggcgccacttccttgataggtcttactttgacctcaggctggatatcggcatccactttcattttctccagtacgtcttctagcctctggcgcttgggcaccattagctgcatggtgggatacaggtcctcaccctcgcgctttacgcctctccgcgcaggcacgggcagcacttgctgcagggtgactggtttgaggctgggggtgggatttccatgatccaaaggaatggacaccgcctcctctttgggactggatctagtgcgcttgccataagcaaactcgtcaaggcggtctgccgcctgctcaagaatattgtcatccccgtacacctcatcataggaccgtttaaaagtagtgctggaacgctcgccgggtgtaaaaaccacagtggtcccgggtctgagcacttgacgcactttgcgcccgcgccactgcacgcgccgtcttggggcgaactcgcgcacaaactccaccagcccatcatcgtcatcttcttcctttttgttatttttgacccgcttgattttgcggggctttttttcatccttcaccggtggaccgtagatttcaggcgcgatgacctggagcatctcttccttgtatttgcgcttggacatacttgccgctgggacacaacatcggagactgctcagtatcttctaagtgcgaggggggcgagtgcgcacgggcacgcgctggccggtagtggcatcacgcacccagtacacattgcctcttcgcggttgggccatgttggcaatggccgctgctgccgccgtggccgcgcgcctgcgggacctgccgctgctggcacctgaagccgcgcgtctggccgctctaagcatggctcttcgccccacacgtttggccctccgcagaatagcttttgcagctcgcatggcgggagtagccctgtggcgcctggcgatgcgcctccttcggctcttccggcgagcataggcgcgggcgtctgccaccacactgtcaataactgcatccacagtagatgtaggcgcagtaggagtataattacgagcatcggcgaccacctggtcgatcacatcatcgaccgtggtccgagtgcgggtacgacccttgagtgcgccccagggagcgcggaaatgaccgcgaacgcgcacagggtgctgggtagagcgtttgcgggcgcctccatacatcttggtgggcgcatacagtccccaaccggtattattactgggcgagatgagaatggacattttttttttttagaaagtgcggcttgaaagaacgcgcggcgcgactatgcccagggccttgtaaacgtagggacaggtgcggcgtctggcgtcagtaacggtcacgcgctggactccccggatactgctgcgtaacggcagggtcccgtgatctgtgagagcaggaacgttttcactgacggtggtaattgtgggcgccggcgggcggatgaggatctggttctcagggaagcggttgaagacgtgcgtgagcgaagtggcctgtcggagctgctgagagtacacggcttgctcattgtagaaactctttgagaagacgggcataagctctgcacccaccactgggtagttgttgacttgtcttgtggagcggaacgtgactgggtcttgcatcatgtcagggagcgaccagtaaacctgctctgccccacaggtgacatctgaagtggtgagcagtgtccaagaccttattcctttcttagggttaccgtaattgtaggacaggtaccaactgcggtaggccgtgttgattttgtcttccaagacattgtagcttctactcttgctgtctttttctagaggttggatctttaactcttttttaacttcagcagctgcagcttcacgtttgtgtttttctgttatataggtatctcctctagttatattatcatcttcactagtttcctctgcaacagccagtgtggttgtttcagtagtggtatcctttttgctttcctcataggcagtgacatccaaaagggcaggaatattacccccttcaagatcttcatacatgattttgaaaccctcctggaatggatgtctcttcctgatgccaagcaagttgctaagtcggctttcagtaaagtctaccccgcaaccaggcagcaatacaatgtcaggatggaatgcctcataagtgtagactcctggcataatcaacttagtttcggggtcccacccgagcctgaaatttctagtgtcaaacttaacaccaatgtcactttccagcactccattctgtctgccaatttccaggtagttgtcaatgatggcattgttcatcaggtcgatcgtcatggtggctgaaaagttgccttctggtaaaatgaactcaaaccactcatacttcaagatatcctctttatgatcataggtgtcatttactgtaacaccttcaggagcttttctggacaccatcaccctcgccttgaacttgttgctgaacatgtactcgttcacgttgggcatgttggtgtgcatgatggtcttcagatgaccgccccatcgcgaccgttcgtcaaagttgatggtctgggtgctagcctccgtgggggtaaagtcattgttctgcaccaccgtggtcaggaagttgctgtggtcgttctgatagttcagggaggcgatgtccgccgacttgttgtcaaccagatacaacttggtggtatcgtacaggggcgacagctccgagtaacgaatgctgtttctcccttccgtaggcgccaggtaccgcgggggtacgaagggaacctccagtgggggctgtatcatcgccgcctgttgctgcatcacgctctcgtaagaaggaggaggaccctccggatacaccaccgctccgcctagcacggctcgtctcctcatcgtactagacacagataacaaaaaagaacgaacgcacgctcggtcgccatggccttggtgagttgcatttttattttactttcacttttacaacatgcgcccgaatctgggacgcagatgagcgaacgggttgccccctcctcttccacccaagtccaacacgctgctatcatcggcagagtcctcatcgtcccacacaagacccatctgtctgtcgtggcgctggcgtctacgggtcggtctgcttgtagcccccaatatcctgggctcgtctctgtgatcctgcgcataggtcttccatctactcatcttatccaccagactctctattccattgttggggaagttcttttccctctctggcctcagcaaagagtcattcaagtactcatcctcgcccatcaagcgcgggcgggttattctccccagttcactgctgcgaacgctgtttagtgaaaagggcaagctagggaaaggacttgcagcttcgggcacggtcgcggcagcaccagccgttccggacagcgacacggaagagtgtcttctatcgcccccttccttcttccaaactgtataaccgggaggcggggagaatatgctgctgtccacatcgtcccacaggaacccgtcattggggtcgggcatgtcgtactcgccagtgtagaaaccaggtgggggcagccagtgtgggttcaggatagcattggtgaaataatcagagttcatggcggccgccctgtgcaggtagtccagcagtttgttaatgaaaggcctgttactagcatacatgctgggctccatgtttcgagctgtcatgtccagcgcggcggtaggtgtcgccccctcctgcatcagaaacagtccaacgctctgttgcacgtatctgaggatccgctcctcctcagcggtaagcgcatactgaggagggatcttctgcgaccggttggttagcaagaagttcagggtggcttccaaactgcccgtgtcttcctgacccagggcgcggctcacttgggtgatttcttgataggtctgctcgtccacctggctctgccctatggcctcgcgatacaggttaagcaggtagcccaagtacgagttgcggtcgatgctaccgctgtcagtaaagggggataccagcagcagcagcaggcgggagttgggagtcagcaagctagacacggtcgcgcgatctcctactggggcgtgcactccccacagacccttcaggttcttgaaagcctgagtcaggttcactgtctgcaagccctgtctgctggtctggaagaagtaatctggcccggactggtacacctcgctctggggcacctcagctaccatgagtctcaatgcactcaaaaagtttgtatagtcttgctgaccacggggcacgttggcgggctgggtgctgaggaaagcgtttagcgctaccaacgaccccaagttggcgccgcgctggaaccgctcgcgctgagacacggcctcgcgcacatcggtcaccatcctgtccaggttggtttgcacgttgctgctgttgtaacgggccacgcgctccaagagagcattgtataccagcccggcctcatcgggacggatggccttgttctccaccagcgcgttcacgatagccaggaccttctcgtgggtggggttggagcgggagggcactacggcctccagtatggccgaaaggcggttggcctggggttgctgtctaaaggcttcggggttgcgggtcgtcagcgccattatgcgttgcatggcctgggtccaatcgtccgaagagttaatgccggacggctggctctgcagcgccgcccgcattgcggggtccggtgcctgctgctgttccatctagcaaaaatacgggtcgcgccatcagtcttccaagtactcgccctcctcgtcctcgacttcatccacctcttctatgtaaggaagctcacaccctgcagcctccatggccctgcgactgggttgccattgcaagtccgctcccatgtcaaagtagttctccccatcagtcccggcccccgttagagctctttgcaagctgtgcataagttctctgtcgctcagctcgcgcctcctgctggcgctcaccgcgcggtgcatcctgtcattgcgatacacccccagatcgtcgctcagagtcagcaccttcagagtcatgcgcatgtaaaacccatctatctttacctccttatctatgggtacgtagggggtcttgtagatcttgcgagcgtagtatttgcccaggctcaagaccgagtagttgatagctgccactttctcagccaaacccaggctacgttcctgcactataatactttgcaggatgttgatcagatcatacagccatctcccatcaggctcggtgatgttcaacaacgcctccctgaatgcctcgttgtccctgctatgttgaaccaccagaaacagctgagctgtcagtggtttgctagtggggttctgggtgatagcctccatcaggtcccacagatgcatcagacccagggtcacttcctcgcgggcgatcagggtgcgcacatggttgttaaaagatttttggaagttgcgctcctccttcacggtctgctcgtaggctgagactaggttggccgcggccacatgtgccctagctgggctgatccctgtcacttcatcgacctcaaaatcctcgtcttgcagcacccgtcttcgatccagaccgtggcgcagctcgcgacccgcgttaaatcgagatgctcgcatctcctctggctcctcaccgctcctgtccctgaacaggttctgctggggcacgtacgcctcgcgagagtcctttttcagttgcacccgcgggtgccgctcgggcgatggtgcgcccaggcgcgccagtccctcgccctcttccaattccagatcataggcgggctgtcccgcgccgctgacggctgcagccgcagtagttacaggagcaggaagagccttttgtggctgttgttgtagctgctgctgagaagggggctgttgctgggggcgcatctgtcgcagcacgggatgcatctgggcaacaaaaaacaaaaaaaaaaaagagggctcgctcccgtaaactggagaagtcggctgggcgggtgccgctcgggcgatggtgcgcccaggcgcgccagtccctcgccctcttccaattccagatcataggcgggctgtcccgcgccgctgacggctgcagccgcagtagttacaggagcaggaagagccttttgtggctgttgttgtagctgctgctgagaagggggctgttgctgggggcgcatctgtcgcagcacgggatgcatctgggcaacaaaaaacaaaaaaaaaaaagagggctcgctcccgtaaactggagaagtcggctggcggggtcttagaaacgtcgcggaaaccggccgatccggcgcgctaagactcgaaccggggcacaccgcaacgcaaccctggcgattaattctccagactacgggcgcgagccactcccagccccgagaactgagtgttctaaagcttgacgcagcactggctcccatccaggaaaaagcaaaaaaacgacccgcctccgtatcctggaggttttgtgcaggcctgggtcgagacgggagtgccagtaccacgttagctgcggctccagcctgatccgagattcgaaccggggtacacgcgcagcccaacccgttcgcttagcctccaggccacggagacgagccgctgaccgctttcgtttttgcccgtatgtctagagcatcaacgactgtgcacgtctcacgggccaaaccgtgcctaccatgaactacttcatgccgctgcgcaacatctggaaccgcgtacgcgagttcccgcgggcatccaccaccgcctccggtatcacctggatgtccaggtacatctacggttaccaccgcctcatgctggaagaccttgcccccggagccccggctacagagcgatggcccctgtaccgccagccaccgccacactttctcatcggctaccagtacctggtgcgcacctgcaacgattacatctttgacacccgcgcatactcgcgcctcaagtacaccgagctcgtgcgccctgggcaccagacagtcaactggtcagtcatggccaactgctcctacacaatcaacaccggggcctaccaccgctttgtggactttgacgacttccaagccaccctcacccaggtgcagcaagccatcctcgccgaaagggttgtagcggacctggcacttgtccagcccatgcgcgggttcgggatcactcgcatgcatggcagagcgggcgaagaagaagtgcccgtggaacgactcatgcaagactactataaagatctggccagatgtcaggataatgcttggggaatggcccatcgcctgcgcatccaacaagccggacccaaagacctggtgctcctcgccaccatccgccgtctcaaaactgcctattttaatttcatcaccagcagcatcgtctcatcctcccaagaggaggaaggaaaagaaagagagaaccccgaccgagcgtctagccgcccccgcccgcaagaaacagtgctcagcctaccttgcgattgcgactggttagacgctttcgtcgaaaggttttcagatcccgtggatcttgagacgatcaggtccttgcgcggagtacctacggggcaattgataaaatgcataatcagcgcggtgtccctgcccaacggagagcctcccagtcaccacttcagggagatgcgcggaggcgtcttcactctgagacccagggagaacggtcgtgccgtcaccgagaccatgcgccgccgccgcggagaggtcattgaaagattcatcgaccgtctgcccgtgcgccgccggcgtcgccgcgttccccctcctcctgcagccccacctgaagaggaagagatgttagtggaagaagaagagattgaggaagaaatcccgggggatttcgagcgcgaggtgcgcaccaccattgccgaactcatccgtcttctggaagaggagttgaccgtgtccgcgcgtaactcccagtttttcaactttgccgtggacttctacgaggccatggagcgcttggaagcgctgggcgatgtcagcgagatgccgctgagacgatggatcatgtatttcttcgtcaccgagcacatcgccaccacactcaactaccttttccagcgcctatgcaactatgcggtcttcacccgccacgtagagcttaacctcgcccaggtggttatgcgcgcgagagatcccgtgggggctgtggtctacagccgcgtctggaacgaggcgggcatgaatgcattctctcaactcattgggcgcatctccaacgacctagcggccaccgtcgagagagcgggccgcggagatcttcaagaggaagagatccagcagttcatggccgagatcgcctaccaggataactctggcgacgtgcaagaaatccttaggcaagccgccgtcaacgataccgagattgattctgttgaactctctttcaggttcaagctcacggggccggtagctttcacccagaggcgtcagatccaggatgtcaaccgccgcgtcgtcgcacatgcgagtcttctcagggcgcagtaccagaacctacccgcgcgcggcgccgacgtaccactgccagccatgccgccgggtcccgagccgcccctgccgcccggtgcgcgccctcgacaccgctcctaaacatgcaagaagcaacagagccaccgccgcccaaaaggaaaaacaagggcacggtggtagcgcccaaggggcacggaaccctgcaagccattgacatctccaccaacggacccgtggagatcaagtaccatctgaacctccctcacgccctcgaaaagatcatgcaagtcaatctcctgacactgcctactaacctgactccgcagcgtctcaggaccctggacagctccggcctgcgcgctctcgtcctcgagctccgcccctgccgcgccgaggtctggacttgcctcccgcgagggctcgtcagcatgaccaccatcgagacagaagatggtcatgccgatgcagacaacatagtagagcgccaggtacaaacgccaggcctcaattttccactgaaatttctcgtcaaaggaagtcaggtacaactcattcatgaggtgcatcccgtgaatcgctgcgagtactgcggccgtctgtacaagcacaagcatgaatgctcggcgcgtcgcagggagttctacttccatcacatcaacagccattcctccaactggtggcaggagatccagttcttcccgattggctctcatcctcgcacagaaaggctcttcctcacctacgatgtggaaacctacacctggatggggtcctttggcaagcagctaatccccttcatgctggtcatgaaactctctggagaccagcggctcgtcaacatcgcctatgacctcgccatgaaacttaagtgggatcgctggcggcaggacccccaaaccttctattgcgtcaccccagaaaaaatggcagtcgggcagcattttcgtcaataccgggaccagttacaaacagcactcgcagtggacctctggtcctccttcctcaaagcgaaccctcacgtgcacgaatgggccctcgaacactatgctctcactgaccctacagatctcacttttgaagaactcaagaagctgcctcatgtcaggggcacccctcgattcttagaactgtacatagtggggcacaacatcaatggctttgatgagatcgtcttggccgctcaggttatcaataaccgagcagaggtccctcagcctttcagaatcacccgaaatttcatgcccagggccggcaagatcctcttcaatgatgttactttcgctttgcccaaccccgcctacaagaagcgggtggacttccaactctgggaacagggggcctgtgatgacatggacttcaagtatcaattcctcaaagtcatggtcagggacacttttgccctcactcatacctcgctgcgcaatgcagcccaagcatactctctcccagtggagaagggatgctgtccctacaaggcagtcaatcagttctacatgttgggctcttaccgtgcagaaaaagacgggtttcccctcgaagagtactggaaggatcgcgaagaataccttctcaaccgcgagctgtgggaaaagaaaagccaaccgcgttatgacatcatccaggaaactctcgactactgtgccctggatgtactcgtcaccgccgagctggtagccaagctgcaagagtcatatgcccacttcataagggactctgtaggcctacctcatgcccattttaacatattccagagacctactatctcttcaaattcccatgccatctttcgccagatcgtttacagggcggaaaaacccaaccgcaccaatctgggcccgggtcttctcgccccctcacatgaactctatgactatgtgcgagcaagcatcagaggggggcgctgttatcccacttacatcggcatcctcgaagagcccctctatgtatacgatatctgtggcatgtatgcctccgcgctcacccaccccatgccctggggcacccctcttaacccctatgagcgcgcgctggcagttcgagaatggcagatgaccttggatgatcccaccaccatcagctattttgacaaagatttgctaccgggaatatttaccatagatgcggacccccctgatgagctcatgctagaccccctcccccctttctgttcaagaaaaggaggtcgactctgctggaccaatgagcccctccgaggcgaggtggccaccagtgtggatctgataaccctgcacaataggggatggcgagtcagaatagttccggatgaactgacaaccatcttccctgaatggaaatgtgtggcgcgcgagtacgtccagcttaacatcgccgccaaggagcgcgcggacaaggaaaagaaccaaaccatgcgctccatcgccaagcttctatccaatgccctctatggatcatttgctaccaagctggacaacaagaagattgtgttttctgaccagatggacgagagtcttatgaaaggcatctctgctggtactgtcaatatcaaatcctcctcgttcctagaaactgacaacctgagtgcagaggtcatgcccgccttcgagagggaatacctaccccaacagctggcgctcctggacagcgatccggaagacagtgaggacgaacagaggcccgcccccttttatacccccccggcggggacccctggtcacgtggcctacacttacaagccaatcacattcttggatgtggaggagggggacatgtgtttacataccgtagagaaggtggaccccctggttgacaacgaccgctacccctcccacgtggcctcctttgtgctggcctggacacgcgcttttgtatcagagtgggctgggttcctctacgaagaggaccgaggcactccgctcgaggacaggcccataaagtcggtctacggggacacggacagcctctttgtcacccagcggggacacgacctcatggaaaccaaaggtaagaaacgcatcaaaaaacatggcggaaaacttgtttttgaccccgatgagccggatctgacctggctcgtggagtgcgaaaccgtctgcgcctcctgcggtgcggatgcatactcccccgaatccattttcctcgcgcccaagctgtatgccctcaaatgtatctactgccccgcctgccataaaacttccaaaggtaagctccgtgccaaaggccacgcggccgaggcgctcaactacgaactcatggtaaactgctacctggccgacatgcagggcgccgatcggcagcggttctcgaccagcaggatgagtctgaagcgcaccctcgcaagcgcccaaccaggcgcgcacccattcaccgtgacggaaacaaccctgactcggacgctgcgaccatggaaggatcggaccctggcagcgctggacgcccatcgtctgattccctactccaggagccgtcccaacccgcgaaacgaggaggtctgctggatcgagatgccatagagcacatcaccgagctctgggaccggctcgagctcttgcaacagactctttccaaaatgcccatggctgacgggctgaagccgctgaaaaacttctcctcgctccaggagcttctatcccttgggggagagcgcctcctaacggacttggtgcgggaaaatatccatgtaagggaaatgatgaacgaagtggcccccctactccgggaggacggcagctgtcgctccctaaactaccatctgcaacccgtaattggggtcatttacggtcccactgggtgcggcaagtctcagctgcttaggaatttgctctcatcccagttaatcaccccggctccagaaacggtattttttatagccccgcaggtggacatgatccccccctctgaactgaaagcctgggaaatgcaaatatgtgaggggaactatgctcccgggccagagggaactttcatcccccaatctggcaccctccgcccaaagtttattaaaatggcttatgatgacctgactcaggagcataactatgatgtttcagacccccggaacgtgttcgcccgtgccgctgcccacggccccatcgctatcattatggatgagtgcatggagaatctggggggtcacaaaggcgtctccaaattttttcatgcttttccctctaagctgcatgataaatttcccaagtgcaccggatacactgtcttagtggtcctgcacaatatgaacccgagacgggatctaggcggcaacattgccaacctcaagatccagtccaaaatgcatataatttcaccccggatgtacccgtcccagctcaatagatttgtaaacacctacactaagggcctccccgttgcaattagtctgctcctaaaagatattgtgcaacaccatgcactccgaccttgctatgactgggtgatttataacactaccccggagcaagaggctcttcaatggagctatctccacccccgagacggactaatgcctatgtatctaaacattcaatcccacctttacagggtactggaaaagatccaccgagttctcaatgatcgagaccgatggtccagggcataccgcgcgcgaaaaatcaaataaaca

SEQ ID NO: 24 - DNA, 4038 bp, Unknown
  Description of Unknown: Human adenovirus 7 sequence
tataaaacgcctggtgatcagaggccgaggtatccagctcaacgacgagtcggttagctcttcgcttggtctgcgaccagacggagtcttccagatcgccggctgtgggagatcttccttcacccctcgtcaggctgtactgactttggagagttcgtcctcgcagccccgctcgggcggcatcggaactctccagttcgtggaggagtttactccctctgtctacttcaaccccttctccggctctcctggccagtacccagacgagttcataccgaacttcgacgcaatcagcgagtcagtggatggctatgattgatgtctaatggtggcgcggctgagctagctcgactgcgacacctagaccactgccgccgctttcgctgcttcgcccgggaactcaccgagttcatctacttcgaactccccgaggagcaccctcagggtccggcccacggagtgcggattaccatcgaagggggaatagactctcgcctgcatcgaatcttctcccagcgacccgtgctgattgagcgcgaccagggaaatacaaccatctccatttactgcatctgtaaccaccccggattgcatgaaagcctttgctgtcttgtttgtgctgagtttaataaaaactgagttaagaccctcctacggactaccgcttcttcaatcaggactttacaacaccaaccagatcttccagaagacccagacccttcctcctctgatccaggactctaactctaccttaccagcaccatccactactaaccttcccgaaactaacaagcttggatctcatctgcaacaccgcctttcacgaagccttctttctgccaatactaccactcccaaaaccggaggtgagctccgcggtctccctactgacgacccctgggtggtagcgggttttgtaacgttaggagtagttgcgggtgggcttgtgctaatcctttgctacctatacataccttgctgtgcatatttagtcatattgcgctgttggtttaaaaaatgggggccatattagtcgtgcttgctttactttcgcttttgggtctgggctctgctaatctcaatcctcttgatcacgatccatgtctagacttcgacccagaaaactgcacacttacttttgcacccgacacaagccgtctctgtggagttcttattaagtgcggatgggactgcaggtccgttgaaattacacataataataaaacatggaacaataccttatccaccacatgggagccaggagttcccgagtggtatactgtctctgtccgaggtcctgacggttccatccgcattagtaacaacacttttattttttctgaaatgtgcgatctggccatgttcatgagcagacagtatgacctatggcctcccagcaaagagaacattgtggcattttccattgcttattgcttggtaacatgcatcatcactgctatcatttgtgtgtgcatacacttgcttatagttattcgccctagacaaagcaataaggaaaaagagaaaatgccttaacctttttactcataccttttctttacagcatggcttttgttacagctctaattattgccaacattgtcactgtcgctcacgggcaaacaattatccatattaccttaggacataatcacacccttgtagggcccccaattacttcagaggttatttggaccaaacttggaagtgttgattattttgatataatttgcaacaaaactaaaccaatatttgtaatctgtaacagacaaaatctcacgttaattaatgttagcaaaatttataacggttactattatggttatgacagatccagtagtcaatataaaaattacttagttcgcataactcagcccaaattaacagtgcccactatgacaataattaaaatggctaataaagcattagaaaattttacatcaccaacaacgcccaatgaaaaaaacattccaaattcaatgattgcaattattgcggcggtggcattgggaatggcactaataataatatgcatgttcctatatgcttgttgctataaaaagtttcaacataaacaggatccactactaaattttaacatttaattttttatacagatgttttccactacaatttttatcattactagccttgcagctgtaacttatggccgttcacacctaactctacctgttggctcaacatgtacactacaaggaccccaacaaggctatgtcacttggtggagaatatatgataatggagggttcgctagaccatgtgatcagcctggtacaaaattttcatgcaacggaagagacttgaccataattaacataacatcaaatgagcaaggcttctattatggaaccaactataaagatagtttagattacaacattattgtagtgccagccaccacttctgctccccgcaaaaccactttctctagcagcagtgccaaagcaagcacaattcctaaaacagcttctgctatgttaaagcttcaaaaaatcgctttaaataattccacagccgctcccaatacaattcctaaatcaacaattggcatcattactgccgtggtagtgggattaattattatatttttgtgcataatgtactatgcctgctgctatagaaaacatgaacaaaaaggtgatgcattactaaattttgacatttaattttttatagaattatgatattgtttcaatcaaataccactaacactatcaatgtgcagactactttaaatcatgacatggaaaaccacactacctcctatgcatacacaaacattcagcctaaatacgctatgcaatagaaattctaaaagacgtcccatctattctcctatgattagtcgtccccatatggctttgaatgaaatctaagatcttttttttttttctcttacagtatggtgaacaccaatcatgatccctagaaatttcttcttcaccatactcatctgtgctttcaatgtctgtgctactttcacagcagtagccactgcaagcccagactgtataggaccatttgcttcctatgcactttttgccttcgttacttgcatctgcgtgtgtagcatagtctgcctggttattaattttttccaactggtagactggatctttgtacgaattgcctacctacgtcaccatcccgaataccgcaatcaaaatgttgcggcacttcttaggcttatttaaaaccatgcaggctatgctaccagtcattttaattctgctactaccctgcattgccctagcttccaccgccactcgcgctacacctgaacaacttagaaaatgcaaatttcaacaaccatggtcatttcttgattgctaccatgaaaaatctgatttccccacatactggatagtgattgttggaataattaacatactttcatgtacctttttctcaatcacaatataccccacatttaattttgggtggaattctcccaatgcactgggttacccacaagaaccagatgaacatatcccactacaacacatacaacaaccactagcactggtagagtatgaaaatgagccacaaccttcactacctcctgccattagttacttcaacctaaccggcggagatgactgaaatactcaccacctccaattccgccgaggatctgcttgatatggacggccgcgtctcagaacagcgactcgcccaactacgcatccgccagcagcaggaacgcgtgaccaaagagctcagagatgtcatccaaattcaccaatgcaaaaaaggcatattttgcttggtaaaacaagccaagatatcctacgagatcaccgctactgaccatcgcctctcttacgaacttggcccccaacgacaaaaatttacatgcatggtgggaatcacccctatagttatcactcagcaaagtggagatactaaggggtgcattcactgctcttgcgattccatcgagtgcacctacaccctgctaaagaccctatgcggcctaagagacctgctacccatgaattaaaaattaataaaaaa

SEQ ID NO: 25 - DNA, 978 bp, Unknown
  Description of Unknown: Human adenovirus 7 sequence
atgaccaagagagtccggctcagtgattccttcaaccctgtctacccctatgaagatgaaagcacctcccaacacccctttataaacccagggtttatttccccaaatggctttacacaaagcccagacggagttcttactttaaaatgtttaaccccactaacaaccacaggcgggtctctacagttaaaagtgggagggggtcttacaatagatgacaccgacggttttttgaaagaaaacataagtgccaccacaccactcgttaagactggtcactctataggtttgtcgctaggacccggattaggaacaaatgaaaacaaactttgtgccaaattgggagaaggacttacattcaattccaacaacatttgcattaatgacaatattaacaccctatggacaggagttaaccccaccagagccaactgtcaaataatggcctccagtgaatctaatgattgcaaattaattctaacactagttaaaactggagccctcgtcactgcatttgtttatgttataggagtatctaacgattttaatatgctaactacacataaaaatataaatttcactgcagagctgttttttgattctactggtaatttattaactagcctttcatccctaaaaactccacttaatcataaatcagggcaaaacatggctactggtgcccttactaatgctaaaggtttcatgcccagcacaactgcctatcctttcaatgttaattccagagaaaaagaaaactacatttacggaacttgttactacacagctagtgatcacactgcttttcccattgacatatctgtcatgcttaaccaaagagcattaaataatgagacatcatattgtattcgtgtaacttggtcctggaatacaggagttgccccagaagtgcaaacctctgctactaccctagtcacctctccatttaccttttactacattagagaagacgactga

SEQ ID NO: 26 - DNA, 126 bp, Unknown
  Description of Unknown: Human adenovirus 7 sequence
atgaccaagagagtccggctcagtgattccttcaaccctgtctacccctatgaagatgaaagcacctcccaacacccctttataaacccagggtttatttccccaaatggctttacacaaagccca

SEQ ID NO: 27 - DNA, 273 bp, Unknown
  Description of Unknown: Human adenovirus 7 sequence
gacggagttcttactttaaaatgtttaaccccactaacaaccacaggcgggtctctacagttaaaagtgggagggggtcttacaatagatgacaccgacggttttttgaaagaaaacataagtgccaccacaccactcgttaagactggtcactctataggtttgtcgctaggacccggattaggaacaaatgaaaacaaactttgtgccaaattgggagaaggacttacattcaattccaacaacatttgcattaatgacaatattaacacc

SEQ ID NO: 28 - DNA, 576 bp, Unknown
  Description of Unknown: Human adenovirus 7 sequence
ctatggacaggagttaaccccaccagagccaactgtcaaataatggcctccagtgaatctaatgattgcaaattaattctaacactagttaaaactggagccctcgtcactgcatttgtttatgttataggagtatctaacgattttaatatgctaactacacataaaaatataaatttcactgcagagctgttttttgattctactggtaatttattaactagcctttcatccctaaaaactccacttaatcataaatcagggcaaaacatggctactggtgcccttactaatgctaaaggtttcatgcccagcacaactgcctatcctttcaatgttaattccagagaaaaagaaaactacatttacggaacttgttactacacagctagtgatcacactgcttttcccattgacatatctgtcatgcttaaccaaagagcattaaataatgagacatcatattgtattcgtgtaacttggtcctggaatacaggagttgccccagaagtgcaaacctctgctactaccctagtcacctctccatttaccttttactacattagagaagacgac

SEQ ID NO: 29 - DNA, 1635 bp, Unknown
  Description of Unknown: Human adenovirus 7 sequence
atgaggagacgagccgtgctaggcggagcggtggtgtatccggagggtcctcctccttcttacgagagcgtgatgcagcaacaggcggcgatgatacagcccccactggaggttcccttcgtacccccgcggtacctggcgcctacggaagggagaaacagcattcgttactcggagctgtcgcccctgtacgataccaccaagttgtatctggttgacaacaagtcggcggacatcgcctccctgaactatcagaacgaccacagcaacttcctgaccacggtggtgcagaacaatgactttacccccacggaggctagcacccagaccatcaactttgacgaacggtcgcgatggggcggtcatctgaagaccatcatgcacaccaacatgcccaacgtgaacgagtacatgttcagcaacaagttcaaggcgagggtgatggtgtccagaaaagctcctgaaggtgttacagtaaatgacacctatgatcataaagaggatatcttgaagtatgagtggtttgagttcattttaccagaaggcaacttttcagccaccatgacgatcgacctgatgaacaatgccatcattgacaactacctggaaattggcagacagaatggagtgctggaaagtgacattggtgttaagtttgacactagaaatttcaggctcgggtgggaccccgaaactaagttgattatgccaggagtctacacttatgaggcattccatcctgacattgtattgctgcctggttgcggggtagactttactgaaagccgacttagcaacttgcttggcatcaggaagagacatccattccaggagggtttcaaaatcatgtatgaagatcttgaagggggtaatattcctgcccttttggatgtcactgcctatgaggaaagcaaaaaggataccactactgaaacaaccacactggctgttgcagaggaaactagtgaagatgataatataactagaggagatacctatataacagaaaaacacaaacgtgaagctgcagctgctgaagttaaaaaagagttaaagatccaacctctagaaaaagacagcaagagtagaagctacaatgtcttggaagacaaaatcaacacggcctaccgcagttggtacctgtcctacaattacggtaaccctaagaaaggaataaggtcttggacactgctcaccacttcagatgtcacctgtggggcagagcaggtttactggtcgctccctgacatgatgcaagacccagtcacgttccgctccacaagacaagtcaacaactacccagtggtgggtgcagagcttatgcccgtcttctcaaagagtttctacaatgagcaagccgtgtactctcagcagctccgacaggccacttcgctcacgcacgtcttcaaccgcttccctgagaaccagatcctcatccgcccgccggcgcccacaattaccaccgtcagtgaaaacgttcctgctctcacagatcacgggaccctgccgttacgcagcagtatccggggagtccagcgcgtgaccgttactgacgccagacgccgcacctgtccctacgtttacaaggccctgggcatagtcgcgccgcgcgttctttcaagccgcactttctaa

SEQ ID NO: 30 - DNA, 2805 bp, Unknown
  Description of Unknown: Human adenovirus 7 sequence
atggccaccccatcgatgatgccccaatgggcatacatgcacatcgccggacaggatgcttcggagtacctgagtccgggtctggtgcagttcgcccgtgcaacagacacctacttcagtatggggaacaagtttagaaaccccacagtggcgcccacccacgatgtgaccaccgaccgtagccagcgactgatgctgcgcttcgtgcccgttgaccgggaggacaatacatactcttacaaagtgcggtacaccctcgccgtgggcgacaacagagtgcttgacatggccagcacattctttgacattaggggggtgcttgatagaggtcctagcttcaagccatattccggcacagcttacaattcactggctcctaagggcgcgcctaacacatctcagtggatagttacaacgggagaagacaatgccaccacatacacatttggcattgcttccacgaagggagacaatattactaaggaaggtttagaaattgggaaagacattactgcagacaacaagcccatttatgccgataaaacatatcagccagagcctcaagttggagaagaatcatggactgatattgatggaacaaatgaaaaatttggaggtagagctcttaaaccagctactaaaatgaagccatgctacgggtcttttgcaagacctacaaacataaaagggggccaagctaaaaacagaaaagtaacaccaaccgaaggagatgttgaagctgaggagccagatattgatatggaatttttcgatggtagagaagctgctgacgctttttcgcctgaaattgtgctttacacggaaaatgtcaatttggaaactccagacagccatgtggtatacaagccaggaacttctgatggtaactctcatgcaaatttgggtcaacaagccatgcctaacagacccaattacattggcttcagggataactttgtaggtcttatgtactacaacagtactggaaatatgggagttttggccggccaagcatcacaactgaatgcagtggttgacttgcaggacagaaacactgaactgtcatatcagcttttgcttgattctctgggagacagaagcagatacttcagcatgtggaatcaggctgtggacagctatgatcccgatgttcgtattattgaaaatcatggcgtcgaggatgaactgcctaattactgttttcctctggatggcataggaccagggaacaaatatcaaggcattaaacctagagacactgcatgggaaaaagatactaaagtttctacagctaatgaaatagccataggcaacaatctggctatggaaattaatatccaagctaatctttggagaagttttctgtactccaatgtggctttgtaccttccagatgtttacaagtacacgccaactaacattactctgcccgctaacaccaacacctatgagtacatgaacgggcgagtggtttccccatctctggtcgattcatacatcaacattggcgccaggtggtctcttgacccaatggacaatgtgaatccatttaaccaccaccgcaatgctggcctacgctaccggtccatgcttctgggcaatggccgttatgtgcctttccacatacaagtgcctcaaaaattctttgctgtcaagaacctacttcttctacctggctcctacacctatgagtggaacttcagaaaggatgtgaacatggtcctgcaaagttcccttggaaatgacctcagaacagatggtgctaacataagtttcaccagcatcaacctctatgccaccttcttccccatggctcacaacaccgcttcaactcttgaagccatgctgcgcaacgataccaatgatcagtcattcaacgactacctctctgcagctaacatgctttaccccatccctgccaatgcaaccaacattccaatttccatcccatctcgcaactgggcagccttcaggggctggtccttcaccagactcaaaaccaaggagactccatctcttggatcagggttcgatccctacttcgtttattctggatctattccctacctggatggcactttttaccttaaccacactttcaagaaggtctccatcatgtttgactcctcagtcagctggcctggcaatgacaggctgttgtctccaaatgagtttgaaatcaagcgcactgtggatggggaaggatacaatgtggcccaatgcaacatgaccaaagactggttcctggttcagatgcttgccaactacaacattggctaccagggcttttacatccctgagggatacaaggatcgcatgtactcctttttcagaaacttccagcctatgagcaggcaggtggttgatgaggttaattacactgactacaaagccgtcaccttaccatatcaacacaacaactctggctttgtaggataccttgcgcctactatgagacaaggggaaccttacccagccaattatccatacccgctcatcggaactactgccgttaaaagtgttacccaaaaaaagttcctgtgcgacaggaccatgtggcgcataccgttctccagcaacttcatgtccatgggagcccttacggacctgggacagaacctgctctatgccaactcggcccatgcgctggacatgacttttgaggtggatcccatggatgagcccaccctgctttatcttcttttcgaagtcttcgacgtggtcagagtgcaccagccacaccgcggcgtcatcgaggccgtctacctgcgcacaccgttctcggccggcaacgccaccacataa

SEQ ID NO: 31 - protein, 325 aa, Unknown
  Description of Unknown: Human adenovirus 7 sequence
MTKRVRLSDSFNPVYPYEDESTSQHPFINPGFISPNGFTQSPDGVLTLKCLTPLTTTGGSLQLKVGGGLTIDDTDGFLKENISATTPLVKTGHSIGLSLGPGLGTNENKLCAKLGEGLTFNSNNICINDNINTLWTGVNPTRANCQIMASSESNDCKLILTLVKTGALVTAFVYVIGVSNDFNMLTTHKNINFTAELFFDSTGNLLTSLSSLKTPLNHKSGQNMATGALTNAKGFMPSTTAYPFNVNSREKENYIYGTCYYTASDHTAFPIDISVMLNQRALNNETSYCIRVTWSWNTGVAPEVQTSATTLVTSPFTFYYIREDD

SEQ ID NO: 32 - protein, 91 aa, Unknown
  Description of Unknown: Human adenovirus 7 sequence
DGVLTLKCLTPLTTTGGSLQLKVGGGLTIDDTDGFLKENISATTPLVKTGHSIGLSLGPGLGTNENKLCAKLGEGLTFNSNNICINDNINT

SEQ ID NO: 33 - protein, 192 aa, Unknown
  Description of Unknown: Human adenovirus 7 sequence
LWTGVNPTRANCQIMASSESNDCKLILTLVKTGALVTAFVYVIGVSNDFNMLTTHKNINFTAELFFDSTGNLLTSLSSLKTPLNHKSGQNMATGALTNAKGFMPSTTAYPFNVNSREKENYIYGTCYYTASDHTAFPIDISVMLNQRALNNETSYCIRVTWSWNTGVAPEVQTSATTLVTSPFTFYYIREDD

SEQ ID NO: 34 - protein, 544 aa, Unknown
  Description of Unknown: Human adenovirus 7 sequence
MRRRAVLGGAVVYPEGPPPSYESVMQQQAAMIQPPLEVPFVPPRYLAPTEGRNSIRYSELSPLYDTTKLYLVDNKSADIASLNYQNDHSNFLTTVVQNNDFTPTEASTQTINFDERSRWGGHLKTIMHTNMPNVNEYMFSNKFKARVMVSRKAPEGVTVNDTYDHKEDILKYEWFEFILPEGNFSATMTIDLMNNAIIDNYLEIGRQNGVLESDIGVKFDTRNFRLGWDPETKLIMPGVYTYEAFHPDIVLLPGCGVDFTESRLSNLLGIRKRHPFQEGFKIMYEDLEGGNIPALLDVTAYEESKKDTTTETTTLAVAEETSEDDNITRGDTYITEKHKREAAAAEVKKELKIQPLEKDSKSRSYNVLEDKINTAYRSWYLSYNYGNPKKGIRSWTLLTTSDVTCGAEQVYWSLPDMMQDPVTFRSTRQVNNYPVVGAELMPVFSKSFYNEQAVYSQQLRQATSLTHVFNRFPENQILIRPPAPTITTVSENVPALTDHGTLPLRSSIRGVQRVTVTDARRRTCPYVYKALGIVAPRVLSSRTF

SEQ ID NO: 35 - protein, 934 aa, Unknown
  Description of Unknown: Human adenovirus 7 sequence
MATPSMMPQWAYMHIAGQDASEYLSPGLVQFARATDTYFSMGNKFRNPTVAPTHDVTTDRSQRLMLRFVPVDREDNTYSYKVRYTLAVGDNRVLDMASTFFDIRGVLDRGPSFKPYSGTAYNSLAPKGAPNTSQWIVTTGEDNATTYTFGIASTKGDNITKEGLEIGKDITADNKPIYADKTYQPEPQVGEESWTDIDGTNEKFGGRALKPATKMKPCYGSFARPTNIKGGQAKNRKVTPTEGDVEAEEPDIDMEFFDGREAADAFSPEIVLYTENVNLETPDSHVVYKPGTSDGNSHANLGQQAMPNRPNYIGFRDNFVGLMYYNSTGNMGVLAGQASQLNAVVDLQDRNTELSYQLLLDSLGDRSRYFSMWNQAVDSYDPDVRIIENHGVEDELPNYCFPLDGIGPGNKYQGIKPRDTAWEKDTKVSTANEIAIGNNLAMEINIQANLWRSFLYSNVALYLPDVYKYTPTNITLPANTNTYEYMNGRVVSPSLVDSYINIGARWSLDPMDNVNPFNHHRNAGLRYRSMLLGNGRYVPFHIQVPQKFFAVKNLLLLPGSYTYEWNFRKDVNMVLQSSLGNDLRTDGANISFTSINLYATFFPMAHNTASTLEAMLRNDTNDQSFNDYLSAANMLYPIPANATNIPISIPSRNWAAFRGWSFTRLKTKETPSLGSGFDPYFVYSGSIPYLDGTFYLNHTFKKVSIMFDSSVSWPGNDRLLSPNEFEIKRTVDGEGYNVAQCNMTKDWFLVQMLANYNIGYQGFYIPEGYKDRMYSFFRNFQPMSRQVVDEVNYTDYKAVTLPYQHNNSGFVGYLAPTMRQGEPYPANYPYPLIGTTAVKSVTQKKFLCDRTMWRIPFSSNFMSMGALTDLGQNLLYANSAHALDMTFEVDPMDEPTLLYLLFEVFDVVRVHQPHRGVIEAVYLRTPFSAGNATT

SEQ ID NO: 36 - protein, 42 aa, Unknown
  Description of Unknown: Human adenovirus 7 sequence
MTKRVRLSDSFNPVYPYEDESTSQHPFINPGFISPNGFTQSP

SEQ ID NO: 37 - DNA, 137 bp, Human mastadenovirus B
catcatcaataatataccttatagatggaatggtgccaatatgtaaatgaggtgattttaaaaagtgtggatcgtgtggtgattggctgtggggttaacggctaaaaggggcggtgcgaccgtgggaaaatgacgtt

SEQ ID NO: 38 - DNA, 137 bp, Human mastadenovirus B
aacgtcattttcccacggtcgcaccgccccttttagccgttaaccccacagccaatcaccacacgatccacactttttaaaatcacctcatttacatattggcaccattccatctataaggtatattattgatgatg

SEQ ID NO: 39 - DNA, 342 bp, Human mastadenovirus B
ttgtgggggtggagtttttttgcaagttgtcgcgggaaatgtgacgcataaaaaggcttttttctcacggaactacttagttttcccacggtatttaacaggaaatgaggtagttttgaccggatgcaagtgaaaattgttgattttcgcgcgaaaactgaatgaggaagtgtttttctgaataatgtggtatttatggcagggtggagtatttgttcagggccaggtagactttgacccattacgtggaggtttcgattaccgtgttttttacctgaatttccgcgtaccgtgtcaaagtcttctgtttttacgtaggtgtcagctgatcgctagggtatt

SEQ ID NO: 40 - DNA, 3452 bp, Human mastadenovirus B
tatacctcagggtttgtgtcaagaggccactcttgagtgccagcgagaagagttttctcctctgcgccggcagtttaataataaaaaaatgagagatttgcgatttctgcctcaggaaataatctctgctgagactggaaatgaaatattggagcttgtggtgcacgccctgatgggagacgatccggagccacctgtgcagctttttgagcctcctacgcttcaggaactgtatgatttagaggtagagggatcggaggattctaatgaggaagctgtaaatggcttttttaccgattctatgcttttagctgctaatgaagggttagaattagatccgcctttggacacttttgatactccaggggtaattgtggaaagcggtacaggtgtaagaaaattacctgatttgagttccgtggactgtgatttgcactgctatgaagacgggtttcctccgagtgatgaggaggaccatgaaaaggagcagtccatgcagactgcagcgggtgagggagtgaaggctgccaatgttggttttcagttggattgcccggagcttcctggacatggctgtaagtcttgtgaatttcacaggaaaaatactggagtaaaggaactgttatgttcgctttgttatatgagaacgcactgccactttatttacagtaagtgtgtttaagttaaaatttaaaggaatatgctgtttttcacatgtatattgagtgtgagttttgtgcttcttattataggtcctgtgtctgatgctgatgaatcaccatctcctgattctactacctcacctcctgagattcaagcacctgttcctgtggacgtgcgcaagcccattcctgtgaagcttaagcctgggaaacgtccagcagtggaaaaacttgaggacttgttacagggtggggacggacctttggacttgagtacacggaaacgtccaagacaataagtgttccatatccgtgtttacttaaggtgacgtcaatatttgtgtgacagtgcaatgtaataaaaatatgttaactgttcactggtttttattgctttttgggcggggactcaggtatataagtagaagcagacctgtgtggttagctcataggagctggctttcatccatggaggtttgggccattttggaagaccttaggaagactaggcaactgttagagaacgcttcggacggagtctccggtttttggagattctggttcgctagtgaattagctagggtagtttttaggataaaacaggactataaccaagaatttgaaaagttgttggtagattgcccaggactttttgaagctcttaatttgggccatcaggttcactttaaagaaaaagttttatcagttttagacttttcaaccccaggtagaactgctgctgctgtggcttttcttacttttatattagataaatggatcccgcagactcatttcagcaggggatacgttttggatttcatagccacagcattgtggagaacatggaaggttcgcaagatgaggacaatcttaggttactggccagtgcagcctttgggtgtagcgggaatcctgaggcatccaccggtcatgccagcggttctggaggaggaacagcaagaggacaacccgagagccggcctggaccctccagtggaggaggcggagtagctgacttgtctcctgaactgcaacgggtgcttactggatctacgtccactggacgggataggggcgttaagagggagagggcatctagtggtactgatgctagatctgagttggctttaagtttaatgagtcgcagacgtcctgaaaccatttggtggcatgaggttcagaaagagggaagggatgaagtttctgtattgcaggagaaatattcactggaacaggtgaaaacatgttggttggagcctgaggatgattgggaggtggccattaaaaattatgccaagatagctttgaggcctgataaacagtataagattactagacggattaatatccggaatgcttgttacatatctggaaatggggctgaggtggtaatagatactcaagacaaggcagttattagatgctgcatgatggatatgtggcctggggtagtcggtatggaagcagtaacttttgtaaatgttaagtttaggggagatggttataatggaatagtgtttatggccaataccaaacttatattgcatggttgtagcttttttggtttcaacaatacctgtgtagatgcctggggacaggttagtgtacggggatgtagtttctatgcgtgttggattgccacagctggcagaaccaagagtcaattgtctctgaagaaatgcatatttcaaagatgtaacctgggcattctgaatgaaggcgaagcaagggtccgccactgcgcttctacagatactggatgttttattttgattaagggaaatgccagcgtaaagcataacatgatttgcggtgcttccgatgagaggccttatcaaatgctcacttgtgctggtgggcattgtaatatgctggctactgtgcatattgtttcccatcaacgcaaaaaatggcctgtttttgatcacaatgtgatgacgaagtgtaccatgcatgcaggtgggcgtagaggaatgtttatgccttaccagtgtaacatgaatcatgtgaaagtgttgttggaaccagatgccttttccagaatgagcctaacaggaatttttgacatgaacatgcaaatctggaagatcctgaggtatgatgatacgagatcgagggtacgcgcatgcgaatgcggaggcaagcatgccaggttccagccggtgtgtgtagatgtgactgaagatctcagaccggatcatttggttattgcccgcactggagcagagttcggatccagtggagaagaaactgactaaggtgagtattgggaaaactttggggtgggattttcagatggacagattgagtaaaaatttgttttttctgtcttgcagctgtcatgagtggaaacgcttcttttaaggggggagtcttcagcccttatctgacagggcgtctcccatcctgggcaggagttcgtcagaatgttatgggatctactgtggatggaagacccgtccaacccgccaattcttcaacgctgacctatgctactttaagttcttcacctttggacgcagctgcagctgccgccgccgcttctgttgccgctaacactgtgcttggaatgggttactatggaagcatcatggctaattccacttcctctaataacccttctaccctgactcaggacaagttacttgtccttttggcccagctggaggctttgacccaacgtctgggtgaactttctcagcaggtggtcgagttgcgagtacaaactgagtctgctgtcggcacggcaaagtctaaataaaaaaatcccagaatcaatgaataaataaa

SEQ ID NO: 41 - DNA, 21483 bp, Human mastadenovirus B
ttggaggctgtgattggtcctcatagaacttgatttcataggggtggtaatcttccggagcaaacttgcgcaagtaggcggaggtccacagtcccggggtcagttttaaactttgcccaggagaagacccatcgccttggctgctggggccttgcaattcaaaggtgcctattatctgggtttcgctcatcaactgggggttgcaagctagggaccggtggggcgtgcacagattgcagcggcagtgacactccagcaagccgtctccgctcacatcctcgatcacatccgagtggtaggagagatagttggccagacggaacaggtagcagtgactccatagcggcggggggcactcgcggtaggtgagaggcacaaagtcggagggcagtgcgcagcaggtggcgggcaggataccggagcgttccaggatgaaagagcgaaaattgttaagcatgctctggctcataaagtcaggcaatccgtttcgcaaagtaaccctgagacgctctgggaagatgaggtctgccaggtcggaagcgacggtgcgctcgtcgaaccctgtccacagaaccttaagagatttctgtaagagcttgtcaagctctttcaagttctgttcttctaaacattgctgccatacacccatgccggtttgccacgtgtggcacaggtacagatagacacaatcgcggatgtaatcacggcgggcttcccccttcagggtgctgtgcagcacgctttgtcctaggcgattctcatgcagaatacccatgtaggaaaccaggttggtgagttccacgttagatatcttgcatgcctgccgcacaaagccgtgtctaaaagtgtagtgcagattctcttcgagtttgcgcaaggtttctgaatcggtaaagaaacgtcggagacactctagttctacggtaaccagcaccacggccatcataagcttgcgacgctcttccaaatccctgggagagtcggtgcccagccatcgggttagctgctcatcactgaccactggtttaccctcatcacaggcatctgggtcatgcatgtcttctgaaaggggacttgcgcgcttaatgagtaactggtccatgaccgccgtcatgactttagggggcaggttgacagcgggatatgcgaagtgtgtgacctcgatgcttcgcttgagtactgcgagtctggcattatcgccttccaattccaccagaacgctgtgatgctcatccatgccattttctcccttttgcagagcatttgcggcccgagtctcattattgcccagaccctcgaagatctttggaacctcttccaaggaagctatatcaggtaagcgtgaaccaggtcccagattgagtagggcatcggcgcgggtgcgattagcgcggcaggagactggaattttttgatttttaaaaaagatgtgataggtagccagtacttctggcacagcaaaagctggataaaagtttaagcgaggatttggctcgcaggtgccgtttggctgacgtttggggggagtacgaggtgaaaagaggttaagctcgtaggcgcggctgagctcttccacactgatgggcacttcagttctgtccaataatgcatccttgactatgagcgactgtcttgctagatgtttaaggagcgcgtcttccccgtcaagccctatgaggtagtcggtgttctgatccctatttccagcatcttggtgatagttatctgctcgttgttttgggcagttttcatcctctctctctagaaagcgtttcaactcttcctcgtgttccaccggtgtcacatagcccgggtcttgctcgatgtctgtctcagactctttcgcttttttattctgcatgtcatgagatgcgtcgacctccttatcttctagggtagaggtggtggcaggactgggcggtggaatgcttaagctctgctccttttcctcgtcgctgaggacgagatgtgatggcactcgtggcgatgttgacagcaatggctgagtttccatgtctgttgtttctctgcctaggagaacacaatggccagccgcgaaggaaatcagttaagcgaccgccacagggagcacacccccgaacgcggaaggggttctgccagtcatccgccttccaggtcggaccgcagcccttcgcaatcgcctccacctctgcccccgaagagaaacacctgtcgccgtgtggggtcaggttcttctaccgacagtcagttggtaatggtgagcgaaacgtcacaatcctccctgtctccggaacggagcgacagtcctcctcctccgataccccccaaaaagaagccaaggaagaccaaacatatccccatgcaagacatcagtcaagacagcgaagaagaaagagaagaggcgcaacttgtagcagtgggtttcagctacccgcccgtgcgcatcgttgagaaggatggcaaaagaagcattgagaagatcgctaaagatgaccctctggctaaaggagctgctgcctgcactgttaagaatccgattagcttgcccctggtgtctgcttgggagaaaggcatggaagtgatgtgtctgctgatggagaagtacaggctggataacgaacttagaacctcttttaaactaatgcctgagcaacacgaacaatacaagcgcatctgtcaccagtacgtaaacgaggagcaccgaggcatccagttaactttcactagtcacaagacactgagcacgatgatgggaagatttctgcagggaatgatacattctttttctcagatcgcccaccataattgggaatgtacaggctgtgcgttgtggcctcatggctgcaatgattatgagggcaagctgaagtgcctgcatggcaatattatgattcagaaggagcagattatcgagatggatgtggccagcgagaacggacaacgagccttaaaggagaatcccgagcgaaccaaaatcacccaaaaccgctggggcagaagtgtggtgcaaatagctaacaatgacgcccgctgctgtgtgaatgatgccggctgtgcagctaaccagttttcgagcaggtcctgcgggatgttttataccgagggtagtaaagcccagcaggctttcaagcaatatgatgctttcatgagagccgtgtatccaggaatcagacaggatcaggccaagatgatactgatccccctgcactgcgattgcaaccacaagcctaattgggtgcccgccatgggtaggcagacctgcaagatgaccccgttcagcattgccaatgctgaagatctggatgtgggcatgattgcagatcccaccgtgctggcaagcgtgagacatccgtcgctgatggtgtttcagtgctgcaatccggtgtaccgcaactctcgcgctcaaagcactggtcctaattgtgatttcaagatttcggctcctgacctgcttggagctttgcagctgaccagaaagctgtggagtgacatcctgcccgatataccggttcccaagttggtgattcccgaattcaagtggcaacccaagtatcagttccgcaacgtatcactgcctgcgggtcattctgattctcgtcagaacccattcgacttgtaaataaataagtaatgcagagccttgatacatgtaaaaaaataaagtgatgtttattgaacacgttgtttacatgagtcattattgaacatccatacggtcgaacgcagtggccctttcgatgtgtgtacgatgggagcgaaaataaggcgaatgggtattaagaaaatggtagagtgctttttgattgtcacacagggtgggctggactttaggagaatgaagcatgttgtttggcactccagttagcaatttcatggtggggtttccgtccatgggacggtcaggccagtgcacaaaggcgtgaaggaacatgcagcagaaaagtccgcaggcggcagaacggggaccctgcacggtctgggtagatttttccagcgtaatacagcggtccttggtagcaagagcgctgcggcgcaggagaccctcatattcaaactggtaaatctgtttgagacgatcatccgagaatccaaaaggatcaaaaaggtagcaggtgttagaacgtgggttccaaccgaaagccaaccagtgctctccccccgtctcacgtccggccgtatttacaatggcacaggcgagcttatcgggggccatgaaccccgggaagcgcttatcgtaggttcccaaaaaatagggtccgcaacccaggtcttggacaatggctctgagctcttgctcgctggagccgttttgggatccgcaggccatggttgcagctgctatttgcaagaagcaagaagcttcttacgtggtagcgttaccggccgagaacggtgtacgcaggtagactgcctcgatgatgccgcggtgtggctgatgcactctgaccacgtcgaaaacttcgaagagaagataaagcagggtgggctcatccatgggatccacctcaaaggtcatgtccagagcatgagctgagttggcatagagcatattctgtcccaagtctgtaagggcccccatagacatgaagttgctcgagaacggtatgcgccacatggttctgtcacacaagaactttttctgcgtaacactatttacggcagttgttccaatgagtggatagggatagttagcgggatagggttgaccttggcgcatggtcggagccatgtaacccacaaagccagagttgttgtgttggtagggtatggcgacggccttgaagtctttgtaattgacctcatcaaccacctgcctgctcatgggctggaagtttctgaaaaatgaatacatgcgatctttgtatccttctggaatgtagaagccctgatagccgatgttgtagttggcgagcatctgtaccaagaaccagtctttggtcatgttgcattgggctacgttgtagccttcgccatccacagtgcgctttatttcaaattcgttaggagatagtaacctgtcatttccaggccagctcactgaagagtcaaacatgatggaaaccttcttaaaagtgtggttcaggtagaaggtaccatccaggtagggaatagaaccagaatagacaaagtaggggtcaaatccagaccccaaagagggagtttctttggttttcagtctggtaaatgaccagcctctgaaagccgcccagttgcgagaaggaatggaaatgggaatattggttgcattggcaggaatggggtagagcatgttagctgcagataggtagtcgttgaatgactgatcattggtgtcattccgcagcatggcttcaagggtggaagcggtgttgtgagccatggggaaaaaagtagcatagaggttgatgctcgtgaaactgatgctggcgccatctacccgcaggtcgttaccgagggaactctgtagaaccatgttcacatccttcctaaagttccactcataagtgtaggagcctgggagaagcagcaggtttttaacagcgaagaatttttgaggcacttgtatgtggaaaggcacataacgtccgttacccagaagcatggatcggtaacgcaagccagcgttacggtggtggttgaatgggttgacattgtccatggcatccagagaccacctggcaccaatgttcacataggtgtctactagagatggcggcaccacccgcccgttcatgtagtcgtaggtgtttttgttttctggaagagtgacattggacggggtgtatttgtacgagtctgggagatatagagccacattggaataaaggaaacttcgccatagattggcttgaaggttaatttccatggcaaacaaattaccctgtccgatctcacttgttccatttacttcaggttccttccaattaggcgcattgtctccatttggaactattgatttgtaactggttgttggaacacctatgccgtccagtggaaaacagtagttgggaagttcatcttccacaccatgattttcaataacacgtacatcaggatcataactgtccacagcctgattccacatgctaaagtatctggttctgtcgcccagagagtcaagcaagagttggtaagaaagttctgtgtttctgtcctgcaagtcaaccactgcatttaactgagacgcttgaccagccagcacccccatgttaccagtactgttatagtacataagtccaataaagttatctctgaagccaatgtagttgggtctgttgggcatagattgttgtcccaaattagcttcggaacttgtgtcttctgttccaggtttgtacactacatgagtgtctggagtttccaaatttacattttctgcatacatgacaattttaggacttaagtttgttttctgcgatgccgcatcaaaaaactccatgtcgatatcatattcgactttctgatttggctgctccgttgttttttgttttgcctgaccgcctttcacattagtaggtttggcaaaggacccgtagcatggtttcatcttagtatcgggtttgagagccctgcctccatacttttcggtttttccatcaaggtcagtccaagtttcatctcccagctgaggttctggctgatatgttttatcagcataaatcggtttactttcttcatctgaaacttccaaacctactgggagtccttcttttgtaatttcagcttcagcttttacaggagcattgccaaaagtgtaagtagtagtattggtttcctcttctgttacgtgttcctcaccagttgtattttttacaccttctgcaatccactgagatgtatttggagcgcctttaggagccagggagttgtaagccgtaccagaatagggtttgaaactgggacctctgtccaacacacccctaatgtcaaagaacgtgctggccatatccagcactctgttgtcgcccacggccagggtgtaccgcactttgtaagagtatgtattgtcctcccggtcaacgggcacgaagcgcaacatgagccgctggctacggtcggtggtcacatcgtgggtcggcgctacggtgggatttctaaacttatttcccagattgaagtaggtgtctgtggcgcgggcgaactgcaccagacccggactcaggtactccgaagcatcctgtccggcgatgtgcatgtatgcccattggggcagcatcgatggggtggccatcttgaaagtaactcagcgtcgacgcacgacctcttccttttttcctctgctgctgtgacggcgtgtaatgacacatatacacagataggcaagttaagcgctactccatatttaattaaaagcagcgacggcgttttacactttgcacgcctagacccacgatgctgttcagagtattttgccagtgcgcatttggacgaggagcgcccccgggacgtgacctggctacggcgactggtttcggggcagcgacaggcttagaagcgggtacagcagtagcagcagggggagggggcaaatccaaggtgacgggtcgatgcaactgagaaggtttcatcaccccggtggccattggggctatcggtctagtggtgggcattccaagcttcgttgcttcctcataagaaggcggttcatctacgcgcgtcaccagcgtctcttccaaatcgggacgcggacgcttgtcgcctcgtttttctggcggaggaatttcttcctccacttgcatttcacctggggttgctggcggcgggtccaaacgactgtttatctttttctgcacagcctggttagccaaatctaccactccattgatgccggaagctatcccatcgactactttttgttggaagttctggtctttaagtttatttctaagcgcctgtcctgtactgctgttccaagctttgttcccgtatgtttttatggttgagccaaaatttttaagcccgctccagatactgctccaattgaaggcgcccccgttcagttggctcgtgccgatgtcgctccaggtgcccatgtacggcttcgtgccgtgtcgcggagccaaggatgaaaaattgatgtcttccatctctaagaaaacatagtcacaggaccaggagtgtcagagtccattgtatttttttttttttatttatacgtttttttccaatgtcaatgtcgttgcgaggcctgaaccgccacggaagctatgcctggtatcgcgccaattgcagcagcgataattggaattaaggctggtaaaaaaccaccccgcaattgcttgcggatagcacgccgtcgcctgtagcgtcgcattccgcgtcccaacatccctcttctacggcgcgagtttcttcctcggtaaccagtgatgggaacgcgaaggcgacaagtgagggccatatctgcaaggaggcagcggcaacattgattaagtgatgatactcggatggtaacgcgcacgcggcagtgtcaaaggttccgcactaccattgcggtacacttgccgcaccagggcgccgggagtcggtttgcttgtgcgtctacggcgacgactgcgatttgcaggtgtcttgcggcgacggcgggaggtactgtttcggctgcgatagtagcgagtgcctcggtaaccaggagtaggaataatagatgggtgtacaacataattgggcatcaacagacttgctggaccgtactttcgtcgggatcttcgagtgggaccggcggcgtcagttgtaataggcatgggcatccatggatccgtttgcacttcagtggaggtggcagtaggctttgcgggttcagtttgcacttccatactttcagtgggaatcttaatgtctacagtttgtacccccagaccaggcgctacctgcttaatgggtctcactttaacctcaggttgaatatctggatccacttttactttctccaaaacgtcctccaacttctggcgtttgggtaccatcagttgcatagtgggatacaaatcttcaccttcgcgtttaacacctgttcgcggagttacgggtaacacttgctgcaaagtgaccggtttaagactaggggtgggatttccatgatccaagggtatcgacactgtctcatccttggaagttattctactacgcttgccataagcaaactcgcctaatcggtcagccgcctgctcaagaatatcatcatccccgtacacctcatcataggaacgcttaaaagtagcgcttgaacgctcgccgggtgtaaagaccaccgaagttccaggtctcaacacatgtcgaactttgcgcccacgccattgcacgcgtcgccgtggggcaaactcgcgcacaaactccgccagcccatcatcgccatcttcctcttcttttttgtcctttttaacccgcttgattttgcggggttttttttcatccttcaacggttggccgtagacttcaggtgcgataacctgcagcatttcttccttgtatttgcgcttggacatcctcgccgctgggacacaacatcggagactgctcagtatcttctaagtgcgagggggacgggtgcgcacgggtacacgttgaccggtggcagcgtcacgcacccagtatacattgcctcttcgcgattgggccatgtcggcaatagtcgccgctgcgacagcggctgcttgcctgcgggacctgccggcgctggcgcccgaagctgcacgtctggccgccctaagcatggctcttcgccccacgcgtctagctcttcgtagcagagctcttgcggctcgcatggcagtggtagctcggtggcgtctggcaatgcgccttcgccggctcttacgtcgagcatagttgcgagcgtcagccactacactgtcaataactgcatccacagtagatgtaggcgcagtaggagtataattacgggcgtcggcaaccacctgatcgattacatcatcgacggtggttcgaacgcgagtgcggcccttgagggcgccccatggagcgcgaaaatgtccgcgaacacggacaggatgttgggtagaacgtttgcgtgcgcctccgtacatcttgcttggagcgcgcagaccccaaccggtgttattactgggcgagataagaatggacattttttttttttttagaaagtgcggcttgaaaggacgcgcggtgcgactatgcccagtgccttgtacacgtagggacaggtgcggcgtctggcgtcagtaacggtcacacgttggactccccggatactgctgcgcaacggcagggtcccgtgatctgtgagagcaggaacgttttcactgacggtggtaatggtgggcgccggcggacggattaaaatctggttctcaggaaagcggttgaagacgtgcgtaagcgaggtggactggcggagctgctgggagtacacagcttgttcgttgtagaagctctttgagaagacgggcataagctctgcacccaccacagggtagttactgacttgtctagtggagcggaaagtgacaggatccttcatcatgtctggaagcgaccagtagacctgctctgctccgcaggtgacatctgaggtggtgagcaatgtccaggaacgcactcctttttcgggatcgccataattgtacgaaagataccaactgcgataggctgtgttgattttgtcttccaacacattatagcttctattcttactatctttttctacaggttgaatagtgagtttcacgtccgttccttcagacacatcggccaataatgattctgcagtcggaacaggtgttggcgcaaaattgtctcctctgacctctccagcgttagcaacccttgtagagtcgctggcaactatgtttgccttagcttctgcagcagctgtagcagcttctattttggctttttgttctttcttactgttctcataggcatctacatccaagagggccggaatattaccaccttctaaatcttcatacaaaatcttaaaaccctcttgaaatggctgtttttttctgataccaagaaggttgctcaaacgactctcggtaaaatccactccgcagccaggcagtaagacaatgtcaggatggaaggcttcatacgtatacactccaggcatgatcaacttggtttcgggatcccatcccagcttgaagttcctggtgtcgaacttaacaccaatgtcactttcaagcactccattctgtctacccactttcaagtaattatctatgatggcattgttcatcaaatcaatagtcatagtaactgaaaagttgccttctggcaaagtaaactcgaaccactcatatttcaaaatatcctgcttgtgatcataagtatccccaactgcagcaccgtcgggaggttttctggacaccatcacacgcgctttgaacttgttactaaacatatactcgttcacgtttggcatgttagtatgcatgatggtctttagctgaccgccccaccgcgatcgttcatcaaagttaatggtctgggtgctggcttccgtaggggtaaagtcattgttttgcaccaccgtggtcaagaagttgctgtggtcattctgatagttcagagaagcaatgtccgccgacttgttgtccaccagatacaacctggtggtatcgtactgaggtgccagttccgaataacgaatgctgtttctgccctccgtaggtgccaggtatcgcggaggcacaaagggagcctccagtggggattgcatcaccgccgtcgcctgctgctgctgcatcacgctctcgtacgaaggaggaggaccctccggatacaccaccgctccgcctagcacgactcgcctcattatactagacacagataataaagaagaacgaacgtacgctcgtcgccatggccttggtgagttttttttttatttttttttacaacataccacccaagcgagggcgcaaatgagcaaacgggttgccccttcctctcccacccaagtccagcacgctgctatcatcggccgaatcctcatcgtcccacacaagacccctctgtctgtcatggcgctggcgtctacggctcgctctacttgtaatccccatgatcccaggctcgtctctgtgatcctgagcataagtcttccatctactcattttatccaccaaactttctattccattgtttgggaaatttttttctcttgccggtctgagcaaggaatcgtttagatactcctcttcgcccattaaactcgggcgacttattctacccacttcgctgctacgtacactgtgtagagaaaagggtagactaggaaaaggacttgcagactcgggctcagccgcggtagcacccatgaccccggacagcgatgcagaagaatgcattctatcgccgccttcctttttccacgtgcgatgatcagaaagaggtgaaaaaacatcgctgtccacgtcgtcccacagaaatccgtcattagggtcgggcatgtcatattcgcccgtgtagaaaccaggtgggggcagccagtgcgggtttaagatggcattggtgaaataatcagagttcatagcggcagctctgtgcaagtagtccagcagtttgttaatgaaaggtcggttactggcatacatgctgggctccatatttcgcgctgtcatgtccagtgctgcagtcggagttgccccctcttgcatcagaaacaatcccacgctctgctgcacatatctaaggatcctctcctcctccgcagtaagagcatattgaggagggatcttttgagaccgattggtaagcaagaagttcagagtggcttccaaactgccagtgtcttcctgtcccaaagcgcgactgacttgggtaatttcttgataggtctgctcgtccacctgactttgccctatggcttcgcgatacaggtttagtaggtaacccaaataggaattacggtcgatgctaccgctgtcggtgaaaggagctaccaacagtaataataggcgggagttcggagttaacaagctagacacggttgctctttctcctaccggggcatgcactccccacaaacctttaaggtttttaaaagcttggctcagatttaccgtctgcaagccctgtctgctagtctgaaagaagtaatcaggaccggactgatacacttcgctctgaggtacttctgataccatcagtctcaaagcgcttaaaaagttagtataatcctgttgaccacgcggcacattagcaggctgagtactcaagaaagcatttaacgccaccagcgaacccaggttggcatcacgctggaacctttcgcgctgagacacggcttcgcgtacatctgttatcatacggtccaaattggtttgcacattgctactgttgtagcgagccacgcgttctaagagagcgttgtataccagtccggcctcatctggacgaatagctttgttctccaccaacgcgttcacgatggccaggaccttctcatgagtgggattagagcgggaaggcactacagcttccatgatggccgatagacggttggcctggggttgctgtctaaaggcttcggggttgcgagtcgtcaacgccatgatacgttgcatggcctgggtccaatcgtccgaggagttaatgccggacggctggctctgcagcgccgcccgcattgcgggatccggtgcttgctgttccatctagcaaaaaacacgggttgtgccatcagtcttccaagtactcgccctcttcctcctcgccttcatccgcctcttctatgtaaggaagctcacatcctgccgtcgcggcgctcagagccctgcgactaggctgccactgcaagtcagctcccatgtcgaagtaattctcaccctcggttccagctccagtcagagctctttgcaaactgtgcatcagttccctgtcgcttaactcgcgcctcctgctggcgctaaccgcgcgatgcattctgtcattgcgatacaccccaagatcatcgctcagggtcaagaccttgagcgtcatgcgcatgtagaacccatctatcttcacctccttgtctatgggaacgtatggagtcttgtagattttgcgagcgtaatattttcccaagctcaaaaccgagtaattgatggcagccaccttctcggccaggcccaggctccgctcctgcactatgatactctgtagaatgttgataagatcatacaaccatctcccctcgggttcggtgatgttcagcagcgcctctctgaaagcctcattgtctctgctgtgttgcaccaccagaaacagctgggcggtcagaggtttgctagtagggttctgaatgatagcttccatcaaatcccacaaatgcatcaaaccaagggtaacttcttcgcgggcaatcagggttcgcacatgattattaaaagacttttggaagttacgctcttcctttactgtctgctcgtaagccgatacaaggttggctgcagccacgtgtgccctggcaggactgatccctgtcatttcatcaacttcgaaatcctcgtcccgcaacactcgtcttcggtccaaaccgtgacgcagctcacgacccgcgttaaagcgggaagctcgcatctcctccggctcctcgccgcttctgtctctaaataggttctgttggggcacatacgcctcgcgagaatcttttttcagttgaactcgcggatgccgctcgggtgaaggcgcacctagacgtgccagtccttcgccctcttccaagtccagatcataggcgggctgtcccgcaccgctcacggcggcagttgcagtagttgcagggacagccttttgtgattgctgctgctgctgctgcgaggggggctgttgttgggggcgcatctgtcgcagcacgggatgcatctgagcggcaaaaaaaaaaaataggactcacttccctgccattcggaaaccagcaaaacgactcgattccgtatcctggatttttgtaggctgggtcgagacgggagtgccaataccacgttagccgcggctccggccggctcgagtacaagtctcgaaccggggtacaccgcgacccaacccgttcacgttcctccaggctacggagtcgagtcgctgaacgctttcattttctccgtgtctatagagcatcaatgactgcgcgcgcctcactggtcaaaccgtgcctacaatgaactacttcatgccgctacgcaacatttggaaccgcgtacgcgagtttcctcgggcttctactaccgccgcaggaatcacctggatgtccaggtacatctacggctatcaccgccttatgttggaagacctcgcccctggcgctccagctacagaacgatggcctctctaccgccaaccaccgccgcattttcttatagggtaccagtatctggtgcgcacctgcaacgattacatctttgacacccgcgcctattcgcgccttaaatacaccgagctcgtgcgccctggtcaccagacagttaactggtcagtcatggccaactgtgcttacaccattaatacaggagcttaccaccgctttgtggattttgatgactttcaagccacccttacccaagtacagcaagccatcctcgccgaaagagtcgtagctgacttggcactggtacaaccaatgcgcggatttggactcacacgtatgcatggcagaacgggtgaggaagaagtgcccgtagaacggctcatgcaagactactacaaagatcttgctagatgtcaggataatgcttggggaatggccaatcgcctgcgtatccagcaagccggacccaaagacctggtgctcctcgccaccatccgccgtcttagaactgcctactttaatttcatcaccagcagcatcgtctcaccttcccgagatgaagaagaaacagaagacccagaccgaacacataaccacccccgcccacaagaagccgtactcagcctaccttgtgactgtgactggttagacgctttcgtcgaaaggttttcagatcccgtggatcttgacacgatcagatctctgcgtgcagtccctacgggccaattaataaaatgtataatcagcgccctctccctcccaaacggagaacctcccagtcaccactttaaggagatgcgcggcggtgtttttactctgcgaccgcgcgagaacggccgcgccgtcactgaaaccatgcgccgccgccgcggagaggtcattgaacgattcatcgaccgtttgcccgtgcgccgtcgacgtcgccgcgtgccccctccgcccccgcctgaagacgaagaagagatgttagtggaagaagagatagaagaggaagaagagatcccgggagccttcgaacgcgaagtacgggccaccatagccgaactcatccgtcttctcgaggaggaattgaccgtgtccgcgcgaaactcccagttttttaattttgccgtggacttctacgaggccatggagcgcttggaagctctgggcgatgttagcgaaatgccgctgagacgatggatcatgtatttcttcgtcgccgaacacattgccaccacactcaactacctttttcagcgcctatgcaactatgcggtcttcaccagacacgtggagcttaacctcgctcaggtggtgatgcgcgcaagagactccgagggggccgtggtttacagccgcgtctggaacgaggcgggcatgaatgcattctcccaactcatgggccgtatctccaatgacctcgcggccaccgtcgaaagagcgggtcgcggagatcttcaggaggaagaaatcgagcagttcatggcggagatcgcctaccaggacaactctggtgacgtacaagaaatactgagacaagctgccgttaacgataccgaaattgattctgttgaactctctttcaggttcaagctcacggggccggtagctttcacccagagacgtcagatacaagacgtcaatcgacgcgtggtggcgcacgcaagtcttctcagagcgcagtaccagaacctgcccgtgcgcggcgccgacgtgccactaccagccatgccctcgggtccggaacaaccgctgccgcccggcgcgcgtccccgtcaccgcttctgagcatgcaagaagcaagagagccaccaccgatcaaaagaaaaaacaaaggtacggtagtggcgcccaaaggacacggaaccctgcaagccattgacgtctctacaaacgaacctgtggaaatcaagtaccatctgaacctcccgcacgccctggaaaagatcatgcaagttaatcttctgtccctacctactaacctgagtccgcagcgtctcaggactctggacagctccagcctgcgcgctctcgtccttcagctccgcccctcccgcgccgaggtctggacttgcctcccgcgggggctcgtcagcatgaccaccatcgaaacagaagatgaacaggccgatacagcgaatatagaagagcacgagatacaatcgccaggcctcggcttcccactgaaatttctcgtcaagggaagccaggtacaactcattcacgagatacaacccgtgcaacgctgcgactactgcggccgtctgtacaagcacaaacacgaatgctcggcgcgccgcagaaacttctacttccatcacatcaacagccaatcctccaactggtggcaggaaatccagttcttcccgatcggctctcatcctcgcacagaaagactcttcctgacctacgatgtggaaacttacacctggatgggatcctttggcaaacaactagttcctttcatgctggtcatgaaactctcaggagaagagcgtctcgtcaacatggcccacgatctagccattaaactcaagtgggatcgatggcaacaagaccccagaaccttctactgtgtcactccagaaaaaatggcaattggccggcattttcgtcagtatcgggaccagttacaaacagcactggcggtagatctttggtcatcattcctacatgcaaatcctcacctgcacgaatgggctctcgaacactacgccttatctgaccccacagacctaacctttgatgagctcagtaagctacctcacgtcagaggcacgccgcgtttcatagaattatacatcgtaggacacaacatcaacggtttcgacgagatcgtcctagctgcccaggtgatcaacaatcgagcggaagtaccacagccttttcgcatcactcgcaattttatgcccagagccggtaagattctcttcaatgatgttactttcgctttgcccaaccccgcctacaagaaacgggtagacttccaactctgggaacagggagcctgtgacgacatcgacttcaaataccaatttctcaaagtcatggtcagagacacctttgcccttactcacgcttcgctacgaaaagctgctcaagcatactctctacccgtagagaagggctgctgcccttacaaggcagttaatcagttctacatgctaggatcttaccgtgcagacaaagacgggtttccgctagaagagtactggaaggatcgcgaagaataccttctcaaccgcgaactgtgggaaaagaaaaaccaaccaggttatgacatcattcaagaaacacttgactactgcgccctagacgtacttgtcaccgccgaactggtaaccaagcttcaagaatcttatgcccactttgtcagagactctgtaggtctacctcatgcccatttcaacatttttcaaagacccaccatctcttccaattctcacgccatctttcgccagatcgtctacagaacagaaaaacccaatcgcaccaacttgggtccggggctgctagcgccatcacatgaactatatgactatgtgcgagcaagtatcagaggggggcgatgctatccaacctacataggcatctttgaggatcccatctacgtctatgacatctgtggcatgtatgcctctgcactcacccatcccatgccatggggcagtccccttaacccatatgagcgcgcactggcagctcgagaatggcaaatggccttagatgaccccactcccatcagctattttgataaggatttacttccgggaatctttaccatggatgcagaccctcccgatgaacttatgctagacccacttccccctttctgttctaggaaaggaggtaggctctgttggaccaatgaaccccttcgaggcgaggtggccaccagtgtggatttaattaccttgcataatcgagggtggcaagtgagaatcgtgccagatgaattaacaactatcttccccgaatggaagtgcctggcacgcgagtatgtccaactcaacatcgccgccaaagagcgcgcggacaaggaaaagaaccaaaccatgcgatccattgccaaacttttatccaacgccctgtatggatcatttgccaccaaacttgacaataaaaaaattgtgttttctgaccaaatggacgaaaacctcatgaaaggcatctcaaccggcactgtcaatatcaaatcctcctcgttcttagaaactgacaacctgagtgcagaggtcatgcccgccttcgagagggaatacctaccccaacagctgacgttcctggacagcgatccggaagacagtgaggaagagcaaagaaccgcccccttttatacccccccagcggggaccccaggtcacgtgaaatacacctacaagccaatcacattcctggatgttgaagagggtgacatgtgtttgcatactttggaaaaggtggaccccctggttgacaacgatcgctacccctcccacatagcctcctttgtgctggcctggacgcgcgcctttgtatcagagtggtcagagttcctgtacgaagaagaccgaggcactccactggagaagaggcctgtaaaatcagtctacggggacacggacagcctgtttgtcactcaacgaggacacgaactcatggagaccaaaggtaagaaacgcatcaaaaaatatggcggaaaacttgtttttgaccccaatgaaccggatttaacctggctggtggaatgtgaaactgtttgcgcctcctgcggcgcagatgcatactccccagaatccgttttccttgcgcccaagttgtatgcgctgaaatgcctatactgcccggtatgcaagaaaacttccaaaggtaagctccgcgccaaaggccacgcagccgaggcgctcaactacgaactcatggtaaactgctacttggccgacatacagggcgccaagcgacagaagttttcgaccagcaggatgagtctgaagcgcaccctggcaagcgcccaagcaggcgcacaccccttcactgtgacggaaacaaccctgactcgaacactgagaccctggaaggaccgaaccctggcagcgctggacgcccatcgtctcataccctattccaggagccgtccaaacccgcgaaacgaggaggtctgctggatcgagatgccatagaacacatcactgaactgtggaacagactagaacttttgcagcaaactctctccaaaatgcccatggctgacggtctgaaaccgctgaaaaacttttcctcactacaagaacttctatcactaggaggagagcgcctcctaatggatttggtgcgggaaaatatgcatgtaagggaaatgatgaacgaggtggcccccttgcttcgagaagacggcagttgccgttccctaaactaccacctgcaacccgtaatcggaatcatttatggccccaccggatgtggcaaatctcaattgctcagaaatttgctatcatcacaattaatcacccccgccccagaaacggtgtttttcatagccccccaggtggacatgattccaccctcggaactgaaagcttgggaaatgcaaatctgtgaggggaactatgctccggggcccgaaggaacattcataccccaatctggtactctccgccccaaattcattaaaatggcttatgatgatttaactcaggaacataactatgatgtgtcagacccacggaacgtgtttgcccgcgccgctgcccacggccccattgctattatcatggatgagtgcatggaaaatcttggaggacacaagggtgtctccaaatttttccacgcttttccatccaagctgcacgataaatttcctaaatgtaccggatacaccgtcttggtggtccttcataacatgaacccaagacgggatcttggcggcaatattgccaacttaaaaatccaatccaaaatgcacataatttcaccccgaatgcacccatcccagctcaaccggtttgtaaacacctacaccaagggcttatctgtggcaatcagcctacttctaaaagatattgtgcaacaccatgcactgcgaccttgttatgactgggtgatttacaacactaccccggagcatgaatcccttcaatggagctatctccaccccaaagacggcctaatgcccatgtatctaaacattcaatcccacctctataggatcctggaaaaaatccaccgagttctcaatgatagagatcggtggtctagggcataccgtgcgcgaaaaatgaaataaa

SEQ ID NO: 42 - DNA, 3759 bp, Human mastadenovirus B
tataaaacgcctgatgatcagaggccgaggtatccagctcaacgacgagtcggtgagctctccgcttggtctacgaccagacggaatctttcagattgccggctgcgggagatcttccttcacccctcgtcaggctgttctgactttggaaagttcgtcttcgcaaccccgctcgggcggaatcgggaccgttcaatttgtggaggagtttactccctctgtctacttcaaccccttctccggatctcctgggcattacccggacgagttcataccgaacttcgacgcgattagcgagtcagtggacggctacgattgatgtctggtgacgcggctgagctatctcggctgcgacatctagaccactgccgccgctttcgctgctttgcccgggaactcattgagttcatctacttcgaactccccaaggatcaccctcaaggtccggcccacggagtgcggatttctatcgaaggcaaaatagactctcgcctgcaacgaattttctcccagcggcccgtgctgatcgagcgagaccagggaaacaccacggtttccatctactgcatttgtaatcaccccggattgcatgaaagcctttgctgtcttatgtgtactgagtttaataaaaactgaattaagactctcctacggactgccgcttcttcaacccggattttacaaccagaagaacgaaacttttcctgtcgtccaggactctgttaacttcacctttcctactcacaaactagaagctcaacgactacaccgcttttccagaagcattttccctactaatactactttcaaaaccggaggtgagctccaaggtcttcctacagaaaacccttgggtggaagcgggccttgtagtgctaggaattcttgcgggtgggcttgtgattattctttgctacctatacacaccttgcttcactttcttagtggtgttgtggtattggtttaaaaaatggggcccatactagtcttgcttgttttactttcgcttttggaaccgggttctgccaattacgatccatgtctagacttcgacccagaaaactgcacacttacttttgcacccgacacaagccgcatctgtggagttcttattaagtgcggatgggaatgcaggtccgttgaaattacacacaataacaaaacctggaacaataccttatccaccacatgggagccaggagttcccgagtggtacactgtctctgtccgaggtcctgacggttccatccgcattagtaacaacactttcattttttctgaaatgtgcgatctggccatgttcatgagcaaacagtattctctatggcctcctagcaaggacaacatcgtaacgttctccattgcttattgcttgtgcgcttgccttcttactgctttactgtgcgtatgcatacacctgcttgtaaccactcgcatcaaaaacgccaataacaaagaaaaaatgccttaacctctttctgtttacagacatggcttctcttacatctctcatatttgtcagcattgtcactgccgctcatggacaaacagtcgtctctatccctctaggacataattacactctcataggacccccaatcacttcagaggtcatctggaccaaactgggaagcgttgattactttgatataatctgcaacaaaacaaaaccaataatagtaacttgcaacatacaaaatcttacattgattaatgttagcaaagtttacagcggttactattatggttatgacagatacagtagtcaatatagaaattacttggttcgtgttacccagttgaaaaccacgaaaatgccaaatatggcaaagattcgatccgatgacaattctctagaaacttttacatctcccaccacacccgacgaaaaaaacatcccagattcaatgattgcaattgttgcagcggtggcagtggtgatggcactaataataatatgcatgcttttatatgcttgtcgctacaaaaagtttcatcctaaaaaacaagatctcctactaaggcttaacatttaatttctttttatacagccatggtttccactaccacattccttatgcttactagtctcgcaactctgacttctgctcgctcacacctcactgtaactataggctcaaactgcacactaaaaggacctcaaggtggtcatgtcttttggtggagaatatatgacaatggatggtttacaaaaccatgtgaccaacctggtagatttttctgcaacggcagagacctaaccattatcaacgtgacagcaaatgacaaaggcttctattatggaaccgactataaaagtagtttagattataacattattgtactgccatctaccactccagcaccccgcacaactactttctctagcagcagtgtcgctaacaatacaatttccaatccaacctttgccgcgcttttaaaacgcactgtgaataattctacaacttcacatacaacaatttccacttcaacaatcagcattatcgctgcagtgacaattggaatatctattcttgtttttaccataacctactacgcctgctgctatagaaaagacaaacataaaggtgatccattacttagatttgatatttaatttgttctttttttttttatttacagtatggtgaacaccaatcatggtacctagaaatttcttcttcaccatactcatttgtgcatttaatgtttgcgctactttcacagcagtagccacagcaaccccagactgtataggagcatttgcttcctatgcactttttgcttttgttacttgcatctgcgtatgtagcatagtctgcctggttattaattttttccaacttatagactggatccttgtgcgaattgcctacctgcgccaccatcccgaataccgcaaccaaaatatcgcggcacttcttagactcatctaaaaccatgcaggctatactaccaatatttttgcttctattgcttccctacgctgtctcaaccccagctgcctatagtactccaccagaacaccttagaaaatgcaaattccaacaaccgtggtcatttcttgcttgctatcgagaaaaatcagaaattcccccaaatttaataatgattgctggaataattaatataatctgttgcaccataatttcatttttgatataccccctatttgattttggctggaatgctcccaatgcacatgatcatccacaagacccagaggaacacattcccctacaaaacatgcaacatccaatagcgctaatagattacgaaagtgaaccacaacccccactactccctgctattagttacttcaacctaaccggcggagatgactgaaacactcaccacctccaattccgccgaggatctgctcgatatggacggccgcgtctcagaacagcgactcgcccaactacgcatccgccagcagcaggaacgcgcggccaaagagctcagagatgtcatccaaattcaccaatgcaaaaaaggcatattctgtttggtaaaacaagccaagatatcctacgagatcaccgctactgaccatcgcctctcttacgaacttggcccccaacgacaaaaatttacctgcatggtgggaatcaaccccatagttatcacccagcaaagtggagatactaagggttgcattcactgctcctgcgattccatcgagtgcacctacaccctgctgaagaccctatacggcctaagagacctgctaccaatgaattaaaaaatgattaataaa

SEQ ID NO: 43 - DNA, 978 bp, Human mastadenovirus B
atgaccaagagagtccggctcagtgactccttcaaccctgtctacccctatgaagatgaaagcacctcccaacacccctttataaacccagggtttatttccccaaatggcttcacacaaagcccaaacggagttcttactttaaaatgtttaaccccactaacaaccacaggcggatctctacagctaaaagtgggagggggacttacagtggatgacaccaacggttttttgaaagaaaacataagtgccaccacaccactcgttaagactggtcactctataggtttaccactaggagccggattgggaacgaatgaaaataaactttgtatcaaattaggacaaggacttacattcaattcaaacaacatttgcattgatgacaatattaacaccttatggacaggagtcaaccccaccgaagccaactgtcaaatcatgaactccagtgaatctaatgattgcaaattaattctaacactagttaaaactggagcactagtcactgcatttgtttatgttataggagtatctaacaattttaatatgctaactacacacagaaatataaattttactgcagagctgtttttcgattctactggtaatttactaactagactctcatccctcaaaactccacttaatcataaatcaggacaaaacatggctactggtgccattactaatgctaaaggtttcatgcccagcacgactgcctatcctttcaatgataattctagagaaaaagaaaactacatttacggaacttgttactacacagctagtgatcgcactgcttttcccattgacatatctgtcatgcttaaccgaagagcaataaatgacgagacatcatattgtattcgtataacttggtcctggaacacaggagatgccccagaggtgcaaacctctgctacaaccctagtcacctccccatttaccttttactacatcagagaagacgactga

SEQ ID NO: 44 - DNA, 126 bp, Human mastadenovirus B
atgaccaagagagtccggctcagtgactccttcaaccctgtctacccctatgaagatgaaagcacctcccaacacccctttataaacccagggtttatttccccaaatggcttcacacaaagccca

SEQ ID NO: 45 - DNA, 273 bp, Human mastadenovirus B
aacggagttcttactttaaaatgtttaaccccactaacaaccacaggcggatctctacagctaaaagtgggagggggacttacagtggatgacaccaacggttttttgaaagaaaacataagtgccaccacaccactcgttaagactggtcactctataggtttaccactaggagccggattgggaacgaatgaaaataaactttgtatcaaattaggacaaggacttacattcaattcaaacaacatttgcattgatgacaatattaacacc

SEQ ID NO: 46 - DNA, 576 bp, Human mastadenovirus B
ttatggacaggagtcaaccccaccgaagccaactgtcaaatcatgaactccagtgaatctaatgattgcaaattaattctaacactagttaaaactggagcactagtcactgcatttgtttatgttataggagtatctaacaattttaatatgctaactacacacagaaatataaattttactgcagagctgtttttcgattctactggtaatttactaactagactctcatccctcaaaactccacttaatcataaatcaggacaaaacatggctactggtgccattactaatgctaaaggtttcatgcccagcacgactgcctatcctttcaatgataattctagagaaaaagaaaactacatttacggaacttgttactacacagctagtgatcgcactgcttttcccattgacatatctgtcatgcttaaccgaagagcaataaatgacgagacatcatattgtattcgtataacttggtcctggaacacaggagatgccccagaggtgcaaacctctgctacaaccctagtcacctccccatttaccttttactacatcagagaagacgac

SEQ ID NO: 47 - DNA, 1686 bp, Human mastadenovirus B
atgaggcgagtcgtgctaggcggagcggtggtgtatccggagggtcctcctccttcgtacgagagcgtgatgcagcagcagcaggcgacggcggtgatgcaatccccactggaggctccctttgtgcctccgcgatacctggcacctacggagggcagaaacagcattcgttattcggaactggcacctcagtacgataccaccaggttgtatctggtggacaacaagtcggcggacattgcttctctgaactatcagaatgaccacagcaacttcttgaccacggtggtgcaaaacaatgactttacccctacggaagccagcacccagaccattaactttgatgaacgatcgcggtggggcggtcagctaaagaccatcatgcatactaacatgccaaacgtgaacgagtatatgtttagtaacaagttcaaagcgcgtgtgatggtgtccagaaaacctcccgacggtgctgcagttggggatacttatgatcacaagcaggatattttgaaatatgagtggttcgagtttactttgccagaaggcaacttttcagttactatgactattgatttgatgaacaatgccatcatagataattacttgaaagtgggtagacagaatggagtgcttgaaagtgacattggtgttaagttcgacaccaggaacttcaagctgggatgggatcccgaaaccaagttgatcatgcctggagtgtatacgtatgaagccttccatcctgacattgtcttactgcctggctgcggagtggattttaccgagagtcgtttgagcaaccttcttggtatcagaaaaaaacagccatttcaagagggttttaagattttgtatgaagatttagaaggtggtaatattccggccctcttggatgtagatgcctatgagaacagtaagaaagaacaaaaagccaaaatagaagctgctacagctgctgcagaagctaaggcaaacatagttgccagcgactctacaagggttgctaacgctggagaggtcagaggagacaattttgcgccaacacctgttccgactgcagaatcattattggccgatgtgtctgaaggaacggacgtgaaactcactattcaacctgtagaaaaagatagtaagaatagaagctataatgtgttggaagacaaaatcaacacagcctatcgcagttggtatctttcgtacaattatggcgatcccgaaaaaggagtgcgttcctggacattgctcaccacctcagatgtcacctgcggagcagagcaggtctactggtcgcttccagacatgatgaaggatcctgtcactttccgctccactagacaagtcagtaactaccctgtggtgggtgcagagcttatgcccgtcttctcaaagagcttctacaacgaacaagctgtgtactcccagcagctccgccagtccacctcgcttacgcacgtcttcaaccgctttcctgagaaccagattttaatccgtccgccggcgcccaccattaccaccgtcagtgaaaacgttcctgctctcacagatcacgggaccctgccgttgcgcagcagtatccggggagtccaacgtgtgaccgttactgacgccagacgccgcacctgtccctacgtgtacaaggcactgggcatagtcgcaccgcgcgtcctttcaagccgcactttctaa

SEQ ID NO: 48 - DNA, 2847 bp, Human mastadenovirus B
atggccaccccatcgatgctgccccaatgggcatacatgcacatcgccggacaggatgcttcggagtacctgagtccgggtctggtgcagttcgcccgcgccacagacacctacttcaatctgggaaataagtttagaaatcccaccgtagcgccgacccacgatgtgaccaccgaccgtagccagcggctcatgttgcgcttcgtgcccgttgaccgggaggacaatacatactcttacaaagtgcggtacaccctggccgtgggcgacaacagagtgctggatatggccagcacgttctttgacattaggggtgtgttggacagaggtcccagtttcaaaccctattctggtacggcttacaactccctggctcctaaaggcgctccaaatacatctcagtggattgcagaaggtgtaaaaaatacaactggtgaggaacacgtaacagaagaggaaaccaatactactacttacacttttggcaatgctcctgtaaaagctgaagctgaaattacaaaagaaggactcccagtaggtttggaagtttcagatgaagaaagtaaaccgatttatgctgataaaacatatcagccagaacctcagctgggagatgaaacttggactgaccttgatggaaaaaccgaaaagtatggaggcagggctctcaaacccgatactaagatgaaaccatgctacgggtcctttgccaaacctactaatgtgaaaggcggtcaggcaaaacaaaaaacaacggagcagccaaatcagaaagtcgaatatgatatcgacatggagttttttgatgcggcatcgcagaaaacaaacttaagtcctaaaattgtcatgtatgcagaaaatgtaaatttggaaactccagacactcatgtagtgtacaaacctggaacagaagacacaagttccgaagctaatttgggacaacaatctatgcccaacagacccaactacattggcttcagagataactttattggacttatgtactataacagtactggtaacatgggggtgctggctggtcaagcgtctcagttaaatgcagtggttgacttgcaggacagaaacacagaactttcttaccaactcttgcttgactctctgggcgacagaaccagatactttagcatgtggaatcaggctgtggacagttatgatcctgatgtacgtgttattgaaaatcatggtgtggaagatgaacttcccaactactgttttccactggacggcataggtgttccaacaaccagttacaaatcaatagttccaaatggagacaatgcgcctaattggaaggaacctgaagtaaatggaacaagtgagatcggacagggtaatttgtttgccatggaaattaaccttcaagccaatctatggcgaagtttcctttattccaatgtggctctatatctcccagactcgtacaaatacaccccgtccaatgtcactcttccagaaaacaaaaacacctacgactacatgaacgggcgggtggtgccgccatctctagtagacacctatgtgaacattggtgccaggtggtctctggatgccatggacaatgtcaacccattcaaccaccaccgtaacgctggcttgcgttaccgatccatgcttctgggtaacggacgttatgtgcctttccacatacaagtgcctcaaaaattcttcgctgttaaaaacctgctgcttctcccaggctcctacacttatgagtggaactttaggaaggatgtgaacatggttctacagagttccctcggtaacgacctgcgggtagatggcgccagcatcagtttcacgagcatcaacctctatgctacttttttccccatggctcacaacaccgcttccacccttgaagccatgctgcggaatgacaccaatgatcagtcattcaacgactacctatctgcagctaacatgctctaccccattcctgccaatgcaaccaatattcccatttccattccttctcgcaactgggcggctttcagaggctggtcatttaccagactgaaaaccaaagaaactccctctttggggtctggatttgacccctactttgtctattctggttctattccctacctggatggtaccttctacctgaaccacacttttaagaaggtttccatcatgtttgactcttcagtgagctggcctggaaatgacaggttactatctcctaacgaatttgaaataaagcgcactgtggatggcgaaggctacaacgtagcccaatgcaacatgaccaaagactggttcttggtacagatgctcgccaactacaacatcggctatcagggcttctacattccagaaggatacaaagatcgcatgtattcatttttcagaaacttccagcccatgagcaggcaggtggttgatgaggtcaattacaaagacttcaaggccgtcgccataccctaccaacacaacaactctggctttgtgggttacatggctccgaccatgcgccaaggtcaaccctatcccgctaactatccctatccactcattggaacaactgccgtaaatagtgttacgcagaaaaagttcttgtgtgacagaaccatgtggcgcataccgttctcgagcaacttcatgtctatgggggcccttacagacttgggacagaatatgctctatgccaactcagctcatgctctggacatgacctttgaggtggatcccatggatgagcccaccctgctttatcttctcttcgaagttttcgacgtggtcagagtgcatcagccacaccgcggcatcatcgaggcagtctacctgcgtacaccgttctcggccggtaacgctaccacgtaa

SEQ ID NO: 49 - protein, 325 aa, Human mastadenovirus B
MTKRVRLSDSFNPVYPYEDESTSQHPFINPGFISPNGFTQSPNGVLTLKCLTPLTTTGGSLQLKVGGGLTVDDTNGFLKENISATTPLVKTGHSIGLPLGAGLGTNENKLCIKLGQGLTFNSNNICIDDNINTLWTGVNPTEANCQIMNSSESNDCKLILTLVKTGALVTAFVYVIGVSNNFNMLTTHRNINFTAELFFDSTGNLLTRLSSLKTPLNHKSGQNMATGAITNAKGFMPSTTAYPFNDNSREKENYIYGTCYYTASDRTAFPIDISVMLNRRAINDETSYCIRITWSWNTGDAPEVQTSATTLVTSPFTFYYIREDD

SEQ ID NO: 50 - protein, 91 aa, Human mastadenovirus B
NGVLTLKCLTPLTTTGGSLQLKVGGGLTVDDTNGFLKENISATTPLVKTGHSIGLPLGAGLGTNENKLCIKLGQGLTFNSNNICIDDNINT

SEQ ID NO: 51 - protein, 192 aa, Human mastadenovirus B
LWTGVNPTEANCQIMNSSESNDCKLILTLVKTGALVTAFVYVIGVSNNFNMLTTHRNINFTAELFFDSTGNLLTRLSSLKTPLNHKSGQNMATGAITNAKGFMPSTTAYPFNDNSREKENYIYGTCYYTASDRTAFPIDISVMLNRRAINDETSYCIRITWSWNTGDAPEVQTSATTLVTSPFTFYYIREDD

SEQ ID NO: 52 - protein, 561 aa, Human mastadenovirus B
MRRVVLGGAVVYPEGPPPSYESVMQQQQATAVMQSPLEAPFVPPRYLAPTEGRNSIRYSELAPQYDTTRLYLVDNKSADIASLNYQNDHSNFLTTVVQNNDFTPTEASTQTINFDERSRWGGQLKTIMHTNMPNVNEYMFSNKFKARVMVSRKPPDGAAVGDTYDHKQDILKYEWFEFTLPEGNFSVTMTIDLMNNAIIDNYLKVGRQNGVLESDIGVKFDTRNFKLGWDPETKLIMPGVYTYEAFHPDIVLLPGCGVDFTESRLSNLLGIRKKQPFQEGFKILYEDLEGGNIPALLDVDAYENSKKEQKAKIEAATAAAEAKANIVASDSTRVANAGEVRGDNFAPTPVPTAESLLADVSEGTDVKLTIQPVEKDSKNRSYNVLEDKINTAYRSWYLSYNYGDPEKGVRSWTLLTTSDVTCGAEQVYWSLPDMMKDPVTFRSTRQVSNYPVVGAELMPVFSKSFYNEQAVYSQQLRQSTSLTHVFNRFPENQILIRPPAPTITTVSENVPALTDHGTLPLRSSIRGVQRVTVTDARRRTCPYVYKALGIVAPRVLSSRTF

SEQ ID NO: 53 - protein, 948 aa, Human mastadenovirus B
MATPSMLPQWAYMHIAGQDASEYLSPGLVQFARATDTYFNLGNKFRNPTVAPTHDVTTDRSQRLMLRFVPVDREDNTYSYKVRYTLAVGDNRVLDMASTFFDIRGVLDRGPSFKPYSGTAYNSLAPKGAPNTSQWIAEGVKNTTGEEHVTEEETNTTTYTFGNAPVKAEAEITKEGLPVGLEVSDEESKPIYADKTYQPEPQLGDETWTDLDGKTEKYGGRALKPDTKMKPCYGSFAKPTNVKGGQAKQKTTEQPNQKVEYDIDMEFFDAASQKTNLSPKIVMYAENVNLETPDTHVVYKPGTEDTSSEANLGQQSMPNRPNYIGFRDNFIGLMYYNSTGNMGVLAGQASQLNAVVDLQDRNTELSYQLLLDSLGDRTRYFSMWNQAVDSYDPDVRVIENHGVEDELPNYCFPLDGIGVPTTSYKSIVPNGDNAPNWKEPEVNGTSEIGQGNLFAMEINLQANLWRSFLYSNVALYLPDSYKYTPSNVTLPENKNTYDYMNGRVVPPSLVDTYVNIGARWSLDAMDNVNPFNHHRNAGLRYRSMLLGNGRYVPFHIQVPQKFFAVKNLLLLPGSYTYEWNFRKDVNMVLQSSLGNDLRVDGASISFTSINLYATFFPMAHNTASTLEAMLRNDTNDQSFNDYLSAANMLYPIPANATNIPISIPSRNWAAFRGWSFTRLKTKETPSLGSGFDPYFVYSGSIPYLDGTFYLNHTFKKVSIMFDSSVSWPGNDRLLSPNEFEIKRTVDGEGYNVAQCNMTKDWFLVQMLANYNIGYQGFYIPEGYKDRMYSFFRNFQPMSRQVVDEVNYKDFKAVAIPYQHNNSGFVGYMAPTMRQGQPYPANYPYPLIGTTAVNSVTQKKFLCDRTMWRIPFSSNFMSMGALTDLGQNMLYANSAHALDMTFEVDPMDEPTLLYLLFEVFDVVRVHQPHRGIIEAVYLRTPFSAGNATT

SEQ ID NO: 54 - protein, 42 aa, Human mastadenovirus B; identical to SEQ ID NO: 36

SEQ ID NO: 55 - DNA, 137 bp, Unknown
  Description of Unknown: Human adenovirus 14 sequence
catcatcaataatataccttatagatggaatggtgccaatatgtaaatgaggtgattttaaaaagtgtgggctgtgtggtaattggctgtggggttaacggctaaaaggggcggcgcggccgtgggaaaatgacgtt

SEQ ID NO: 56 - DNA, 137 bp, Unknown
  Description of Unknown: Human adenovirus 14 sequence
aacctcattttcccacggccgcgccgccccttttagccgttaaccccacagccaattaccacacagcccacactttttaaaatcacctcatttacatattggcaccattccatctataaggtatattattgatgatg

SEQ ID NO: 57 - DNA, 342 bp, Unknown
  Description of Unknown: Human adenovirus 14 sequence
ttttgggggtggagtgtttttgcaagttgtcgcggtaaatgtgacgcaaacaaaggctttttttttacggaactacttagtgttcccacggtatttaacaggaaatgaggtagttttggccggatgcaagtaaaaattgttcattttcgcgcgaaaactgaatgaggaagtggttttctgaataatgcggtatttatggcagggtggagtatttgttcagggccaggtagactttgacccattacgtggaggtttcgattaccgcggaggtttcgattaccgtgttttttacctaaatttccgcgtaccgtgtgaaagtcttctgtttttacgtaggtgtca

SEQ ID NO: 58 - DNA, 3468 bp, Unknown
  Description of Unknown: Human adenovirus 14 sequence
gctgatcgctacggtatttatacctcagggtttgtgtcaagaggccactcttgagtgccagcgagaagagttttctcctctgcgccggcagtttaatattaaaaaaaatgagacacttgcgatttatgcctcaggaaataatttctgctgagactggaaacgaaatactggagtttgtggtgcacgccctgatgggagacgatccggagccacctgtgcagctttttgagcctcctacgcttcaggaactgtatgatttagaggtagagggatcggaggattctaatgaggaagctgtgaatggcttttttaccgattctatgcttttagctgctaatgaaggattagaattagatccgcctttggacactttcgatactccaggggtgattgtggaaagcggtacagctgtaagaaaattacctgatttgggttccgtggactgtgatttgcactgctatgaagacgggtttcctttgagtgatgaggaggaccatgaaaaggagcagtctatgcagactgcagcgggtgagggagtgaaggctgccattggttttcagttggattgcccggagcttcctggacatggctgtaagtcttgtgaatttcacaggaaaaatactggagtaaaggaactgttatgttcgctttgttatatgagagcgcactgccactttatttacagtaagtgtgtttaagttaaaatttaaaggaatatgctgtttttcacatgtatattgagtgggaaatttgtgcttcttattataggtcctgtgtctgatgctgatgagtcaccatctcctgattctactacctcacctcctgagattcaagcacctgttcctgtggacgtgcacaagcccattcctgtaaagcttaagcctggaaaacgtccagcagtggaaaaactcgaggacttgttacagggtggggacggacctttggacttgagtacacggaaacggccaagacaataagtgttccatatccgtgtttacttaaggtgacgtcaatatttgtgtgagagtgcaatgtaataaaaatatgttaactgtgtactggtttttattgctttttgggcggggactcaggtatataagtagaagcagacctgtgtggttagctcatagaagctggctttgattcatggaggtttgggccattttggaagaccttagaaagactaggcaactgttagagaacgcttcggacggagtctccggtttttggagattctggttcgctagtgaattagctagggtagtttttaggataaaacaggactataaagaagaatttgaaaagttgttggtagattgtccaggactttttgaagctcttaatttgggccatcaagttcactttaaagaaaaagttttatcagttttagacttttcgaccccaggtagaactgccgctgctgtggcttttcttacttttatattagataaatggatcccgcagactcatttcagcaggggatacgttttggatttcgtagccacagcattgtggagaacatggaaggttcgcaagatgaggacaatcttaggttactggccagtgcagcctttgggtgtagcgggaatcctgaggcatccaccggtcatgccagcggttctggaggaggaacagcaagaggacaacccgagagccggcctggaccctccagtggaggaggcggagtagctgacttgtctcctgaactgcaacgggtgcttactggatctacgtccactggacgggataggggcgttaaaagggagagggcatctagtggtactgatgctagatctgagttggctttaagtttaatgagtcgcagacgtcctgaaaccatttggtggcatgaggtccagaaagagggaagggatgaagtttctgtattgcaggagaaatattcactggaacaggtgaaaacatgttggttggagcctgaggatgattgggaggtggccattaaaaattatgccaagatagctttgaggcctgataaacagtataagattactagacggattaatatccggaatgcttgttacatatctggaaatggggctgaggtggtaatagatactccagacaagacagttattagatgctgcatgatggatatgtggcctggagtagtcggtatggaagcagtaacttttgtaaatgttaagtttaggggagatggttataatggaatagtgtttatggccaataccaaacttatattgcatggttgtagcttttttggttttaacaatacctgtgtagatgcctggggacaggttagtgtacggggatgtagtttctatgcgtgttggattgccacagctggcagaaccaagagtcaattgtctctgaagaaatgcatattccaaagatgtaacctgggcattcttaatgaaggcgaagcaagggtccgccactgcgcttctacagatactggatgttttattttaattaagggcaatgccagcgtaaagcataacatgatttgcggtgcttccgatgagaggccttatcaaatgctcacttgtgccggagggcattgtaacatgctggctactgtgcatattgtttctcatcaacgcaaaaaatggcctgtttttgatcacaatgtgttgaccaagtgtaccatgcatgcaggtgggcgtagaggaatgtttatgccttaccagtgtaacatgaatcatgtaaaagtgttgttggaaccagatgccttttccagaatgagtctaacaggaatgtttgacatgaacatgcaaatctggaagatcctgaggtatgatgatacaagatcgagggtgcgcgcatgcgaatgcggaggcaagcatgccaggttccagccggtgtgtgtagatgtgactgaagatctgagaccggatcatttggttattgcccgcactggagcagagttcggatccagtggagaagaaactgactaaggtgagtattgggaaaactttggggtgggattttcagatggacagattgagtaaaaatttgtttttctgtcttgcagctgtcatgagtggaaacgcttcttttaatgggggagtcttcagcccttatctgacagggcgtctcccatcctgggcaggagttcgtcagaatgttatgggatctactgtggatggaagacccgtccaacccgccaattcttcaacgctgacctatgctactttaagttcttcacctttggacgcagctgcagccgccgctgccgcctctgttgccgctaacactgtgcttggaatgggttactatggaagcatcctggctaattccacttcctctaataacccttctaccctgactcaggacaagttacttgtccttttggcccagctggaggctttgacccaacgtctgggtgaactttctcagcaggtggccgagttgcgagtacaaactgagtctgctgtcggcacggcaaagtctaaataaaaaaaaaaaattccagaatcaatgaataaa

SEQ ID NO: 59 - DNA, 19427 bp, Unknown
  Description of Unknown: Human adenovirus 14 sequence
atggccagccgcgaaggaaatcagttaagcgaccgccacagggagcacacccccgaacgcggaaggggttctgccagtcatccgccttccaggtcggaccgcagcccttcgcaatcgcctccacctctgcccccgaagagaaacacctgtcgccgtgtggggtcaggttcttctaccgacagtcagttggtaatggtgagcgaaacttcacaatcctccctgtctccggaacggagcgacagtcctcctcccccgataccccccaaaaagaagccaaggaagaccaaacatgttcccatgcaagacatcagtcaagacagcgaagaagaaagagaagaggcgcagcttgtagcagtaggtttcagctacccgcccgtgcgcatcgttgagaaggatggcaaaagaagcattgaaaagattgccaaagatgatcctctggctaaaggagctgctgcctgtactgttaagaatccgattagcttgcccctggtgtctgcttgggagaagggcatggaagtgatgtgtgtactgatggagaagtacaggctggataacgaacttagaacctcttttaaactaatgcctgagcagcacgaacaatacaagcgcatctgtcaccagtacgtaaacgaggagcaccgaggcatccagttaactttcactagtcacaagacactgagcacgatgatgggaagatttctgcagggaatgatacattctttttctcagatcgcccaccataattgggaatgtacaggctgtgcgttgtggcctcatggctgcaatgattatgagggcaagctgaagtgcctgcatggcactattatgattcagaaggagcagattatcgagatggatgtggccagcgagaatggacaacgagccttgaaggagaatcccgagcgaaccaaaatcacccaaaaccgctggggcagaagtgtggtgcaaatagccaacaatgacgcccgctgctgtgtgaatgatgccggctgcgcagctaaccagttttcgagcaggtcctgcgggatgttctataccgagggtagtaaagcccagcaggctttcaagcaatatgatgctttcatgagagccgtgtatccaggaatcagacaggatcaggccaagatgatactaatccccctgcactgcgattgcaaccacaagcctaattgggtgcccgccatgggtaggcagacctgcaagatgaccccgttcagcattgccaatgctgaagatctggatgtgggcatgattgcagatcccaccgtgctggcaagcgtgagacatccgtcgctgatggtgtttcagtgctgcaatccggtgtaccgcaactctcgcgctcagagcactggtcctaattgtgatttcaagatttcggctcctgacctgctgggagctttgcagctgaccagaaagctgtggagtgacatcctacccgatataccggttcccaagttggtgattcccgaattcaagtggcaacccaagtatcagttccgcaacgtatcactgcccgcgggtcattctgattctcgtcagaacccattcgacttgtaaataaataagtaatccagagccttgatacgtgtaaaaaataaagtgctgtttattcaacacgttgtttacatgagtcattattgcacatccatacggtcgaacgcagtggccctttcgatgtgtgtacgatgggagcgaaaataaggcgaatgggtattgagaaaatggtagagtgctttttgattgtcacacagggtgggctggactttaggagaatgaagcatgttgtttggcactccagtcagcaatttcatggtggggtttccgtccatgggacggtcaggccagtgcacaaaggcatgaaggaacatgcagcagaaaagtccgcaggcggcagaacgggggccctgcacggtctgggtagatttttccagcgtaatacagcggtccttggtagcaagagcgctgcggcgcaggagaccctcatattcaaactggtaaatctgtttaagacgatcatccgagaatccaaaaggatcaaaaaggtagcaggtgttagaacgtgggttccaaccgaaagccaaccagtgctctccccccgtctcacgtccggccgtgtttacaatggcacaggcgagcttatcgggggccatgaaccccgggaagcgcttatcgtaggttcccaaaaaatagggtccgcaacccaggtcttggacaatggctctgagctcttgctcgctggagccgttttgggatccgcaggccatggttgcagctgctgtttgcaagaagcaagaagctttttacgtggtagcgttaccggccgagaacggtgtacgcaggtagactgtctcgatgatgccgcgatgtggctgatgcactctgaccacgtcgaaaacttcgaagagaagataaagcagggtgggctcatccatgggatccacctcaaaggtcatgtccagagcatgagctgagttggcataaagcatgttctgtcccaagtctgtaagggcccccatagacatgaagttgctcgagaacggtatgcgccacatggttctgtcacacaagaactttttctgcgtaacactatttacggcagttgttccaatgagtggatagggatagttagcgggatagggttgaccttggcgcatggtcggagccatgtaacccacaaagccagagttgttgtgttggtagggtatggcgacggccttgaagtctttgtaattgacctcatcaaccacctgcctgctcatgggctggaagtttctgaaaaatgaatacatgcgatctttgtatccttctggaatgtagaagccctgatagcctatgttgtagttggcgagcatctgtaccaagaaccagtctttggtcatgttgcattgggctacattgtagccttcgccatccacagtgcgctttatttcaaattcgttgggagatagtaacctgtcatttccaggccagctcactgaagagtcaaacatgatggaaaccttcttaaaagtgtggttcaggtagaaggtaccatccaggtagggaatagaaccagaatagacaaagtaggggtcaaatccagaccccaaagagggagtttctttggttttgagtctggtaaatgaccagcctctgaaagccgcccagttgcgagaaggaatggaaatgggaatattggttgcattggcaggaatgggatagagcatgttagctgcagatagatagtcgttgaatgactgatcattggtgtcattccgcagcatggcttcaagggtggaagcggtgttgtgagccatggggaaaaaggtagcatagaggttgatgctcgtgaaactgatgctggcgccatctacccgtaggtcgttaccgagggaactctgtagcaccatgttcacatccttcctgaagttccactcataagtgtaggagcctgggagaagcagcaggtttttgacagcgaagaatttttgaggcacttgtatgtggaaaggcacataacgtccgttacccaaaagcatggatcggtaacgcaagccagcgttacggtggtggttgaatgggttgacattgtccatagcatccagagaccacctggcgccaatgttcacataggtgtctactagagatggcggcaccacccgcccgttcatgtagtcgtaggtgtttttgttttctggaagagtgacattggacggggtgtatttgtacgagtctgggagatacagagccacattggaataaaggaaacttcgccatagattggcttgaaggttaatttccatggcaaatggatttcccttaacaagttcactgataccatttggatttacatctttccaagcttggtctccatttaactgaatctccttgtaactatctgttcgcggaccgatgccgtccagtggaaaacagtagttgggaagttcatcttccacaccatgattttcaataacacgcacatcgggatcataactgtcaacagcctgattccacatgctaaagtatctggttctatcgcccagggagtcaagcaagagttggtaagacagttctgtgtttctgtcctgcaagtcaaccactgcattcaactgagatgcttggccagccagcacccccatgttaccagtactgttatagtacataagaccaataaaattatctctgaagccaatgtagttgggtctgttgggcatagactgctgtccaagattagcatttgaactagcatctgaaacttcaggtttgtacacaacatgagtatctggagattccaggtccacattttctgcatacattacaatcttaggtttaagaccttgtttttgtgatcttaagtcaaaaaagttcatgtcaatgtcatattcaatgttgttgccttcttctgttttcacttttgcctgtccgcctttcacattagtaggtttagcaaaagacccatagcacggtttcattttagtgtccggtttaagtactctgcctccgtatttttcttcagtgccatctgtatcagtccacgattcctgtcccacctggggttctggttggtaaagcttattagcgtagataggtttagggtcaccttcagctgggacttccaaacctattggtagtccgtcttttgtaatgtcagcatcggcttttactggggcattgccaaaagtgtatgtagctttttcgtcattttccccgtcttcattttgccgttcttcagtagtttcaacccctttatccaaccactgagatgcatttggagcgcctttaggagccagagagttgtaagccgtaccagaatagggtttgaaactgggacctctgtccaacacgcccctaatgtcaaagaacgtgctggccatatccagcactctgttgtcgcccacggccagggtgtaccgcactttgtaagagtatgtattgtcctcccggtcaacgggcacgaagcgcaacatgagccgctggctacggtcggtggtcacatcgtgggttggcgctacggtgggatttctaaacttatttcccagattgaagtaggtgtctgtggcgcgggcgaactgcaccagacccggactcaggtactccgaagcatcctgtccggcgatgtgcatgtatgcccactggggcagcatcgatggggtggccatcttgaaagtaactcagcgtcgacgcacgacctcttccttttttcctctgctgctgtgacggcgtgtaatgacacatatacacagataggcaagttaagcgctactccatatttaattaaaagcagcgacggcgttttacactttgcacgcctagacccacgatgctgttcagagtattttgccagtgcgcatttggacgaggagcgcccccgggacgtgacctggctacggcgactggtttcggggcagcgacaggcttagaagcgggtacagcagtagcagcagggggagggggcaaatccaaagtgacgggtcgatgcaactgagaaggtttcattaccccggtagccataggggctatcggtctagtggtgggcattccaagcttcgttgcttcctcataagaaggcggttcatctacgcgcgtcaccagcgtctcttccaaatcgggacgcggacgcttgtcgcctcgtttttctggcggaggaatttcttcctccacttgtatttcacctggggttgctggcggcgggtccaaacgactgtttatctttttctgcacagcctgattagccaaatctaccactccattgatgccggaagctatcccatcgactactttttgttgaaagttctggtctttaagtttatttctaagcgcctgtcctgtactgctgttccaagctttgttcccgtatgtttttatggttgagccaaaatttttaagcccgctccagatactgctccaattgaaggcgcccccgttcagttggctcgtgccgatgtcgctccaggtgcccatgtacggcttcgtgccgtgtcgcggagccaaggatgaaaaattgatgttttccatctctaagaaaacatagtcacaggaccaggagtgtcagagtccattgtatttttttttttatttatacttttttttccaatgtcaatgtcgttgcgaggcctgaaccgccacggaagctatgcctggtatcgcgccaattgcagcagcgataattggaattaaggctggcaaaaaaccaccccgcaattgcttgcggatagcacgccgtcgcctgtagcgtcgcattccgcgccccaacatccctcttctacggcgcgaatttcttcctcggtaaccagtgatgggaacgcgaaggcgacaagtgagggccatatctgcaaggaggcagcggcaacattgattaagtgatgatacttggatggtaacgcgcacgcggcagtgtcaaaggttccgcactactattgcggtacacttgccgcaccagggcgccgggagtcggtttgcttgtgcgtctacggcgacgactgcgatttgcaggtgtcttgcggcgacggcgggaggtactgtttcggctgcgatagtagcgagtgcctcggtaaccaggagtaggaataatagatgggtgtacaacatagttgggcatcaacagacttgctggaccgtactttcgtcgggatcttcgagtgggaccggcggcgtcagttgtaataggcatcggcatccatggatccgtttgcacttcagtggaggtggcagtaggctttgcgggttcagtttgcacttccatactttcagtgggaatcttaatgtctacagtttgtactcccagaccaggcgctacctgcttaatgggtctcactttaacctcaggttgaatatctggatccacttttactttctccaaaacgtcctccaacttttggcgtttgggtaccattagttgcatagtgggatacaaatcttcaccttcgcgtttaacacctgttcgcggagttacgggtaacacttgctgcaaagtgaccggtttaagactaggggtgggatttccatgatccaagggtatggacactgtctcatccttgggatttattctactacgcttgccataagcaaactcgcctaatcggtcagccgcctgctcaagaatatcatcatccccgtacacctcatcataggaacgcttaaaagtagcgcttgaacgctcgccgggtgtaaagaccaccgaagttccaggtctcaacaaatgtcgaactttgcgtccacgccattgcacgcgtcgccgtggggcaaactcgcgcacaaactccgccagcccatcatcgccatcttcctcttcttttttgtcctttttagcccgcttgattttgcggggttttttttcatccttcagcggttggccgtagacttcaggtgcgataacctgcagcatttcttccttgtatttgcgcttggacatcctcgccgctgggacacaacatcggagactgctcagtatcttctaagtgcgagggggacgggtgcgcacgggtacacgttgaccggtggcagcgtcacgcacccagtatacattgcctcttcgcgtttgggccatgtcggcaatagtcgccgctgcgacagcggctgcttgcctgcgggacctgccggcgctggcgcccgaagctgcacgtctggccgccctaagcatggctcttcgtcccacgcgtctagctcttcgtagcagagctcttgcggctcgcatggcagtggtagctcggtggcgtctggcaatgcgccttcgccggctcttacgtcgagcatagttgcgagcgtcagccactacactgtcaataactgcatccacagtagatgtaggcgcagtaggagtataattacgggcgtcggcaaccacctcatcgattacatcatcgacggtggttcgaacgcgagtgcggcccttgagggcaccccatggagcgcgaaaatgaccgcgaacacgcacgggatgttgggtagaacgtttgcgtgcgcctccgtacatcttgcttggagcgcgcagaccccaaccggtgttattactgggcgagataagaatggacatttttttagaaagtgcggcttgaaaggacgcgcggtgcgactatgcccagtgccttgtacacgtagggacaggtgcggcgtctggcgtcagtaacggtcacacgttggactccccggatactgctgcgcaacggcagggtcccgtgatctgtgagagcaggaacgttttcactgacggtggtaatggtgggcgccggcggacggattaaaatctggttctcaggaaagcggttgaagacgtgcgtaagcgaggtggactggcggagctgctgggagtacacagcttgttcgttgtagaagctctttgagaagacgggcataagctctgcacccaccacagggtagttgctgacttgtctagtggagcggaaagtgacaggatcctgcatcatgtctggaagcgaccagtagacctgctctgctccgcaggtgacatctgaggtggtgagcaatgtccaggaacgcactcctttttcgggatcgccataattgtacgaaaggtaccaactgcgataggctgtgttgattttatcttccaacacattatagcttctattcttactatctttttctacaggttgaatagtgagtttcacgtccgttcctccagttacatcggccaataatgattctgcagtcggaacaggtgttggtgcaaaattgtctcctctgacctctccagcgttagcaacccttgtaaagtcgctggcaactatgtttgccttagcttccgcagcagcttctattttggctttttgttctttcttactgttctcataggcatctacatccaagagggccggaatattacctccttctaaatcttcatacaaaatcttaaaaccctcttgaaatggctgtttttttctgataccaagaaggttgctcaaacgactttcggtaaagtccactccacagccaggcagtaagacaatgtcaggatgaaaggcttcatacgtatacactccaggcataatcaacttggtttcgggatcccatcccagcttgaagttcctggtgtcgaacttaacaccaatgtcactttcaagcactccattctgtctgcccactttcaagtagttatctatgatggcattgttcatcaaatcaatggtcatagtaactgaaaagttgccttctggcaaagtaaactcgaaccactcatattccaaaatatcctgcttgtgatcatatgtatccccaactgcagcaccttcgggaggttttctggacaccatcacacgcgctttgaagttgttactaaacatatactcgtttacgttgggcatgttagtatgcatgatggtctttagctgaccgccccaccgcgatcgttcatcaaagttaatggtctgggtactggcttccgtaggggtaaagtcattgttctgcaccaccgtggtcaagaagttgctgtggtcattctgatagttcagagaagcaatgtccgccgacttgttgtccaccagatacaacctggtggtatcgtactgaggtgccagttccgagtaacgaatgctgtttctgccctccgtaggtgccaggtatcgcggaggtacaaagggagcctccagtggggattgcatcaccgccgtcgcctgctgctgctgcatcacgctctcgtacgaaggaggaggaccctccggatacaccaccgctccgcctagcacgactcgcctcattatactagacacaaataataaagaagaacgaacgtacgctcgtcgccatggccttggtgagttttcctttttattttttttttacaacataccacccaagcgagggcgcaaatgagcaaacgggttgccccttcctctcccacccaagtccaacacgctgctatcatcggccgaatcctcatcttcccacacaagacccctctgtctgtcatgacgctggcgtctacggctcgctctacttgtagtccccatgatcccaggctcgtctctgtgatcctgagcataagtcttccatctactcatcttatccaccaaactttctattccattgtttgggaaatttttttctctcgccggtctgagcaaggaatcgtttaggtattcctcttcgcccattaaactcgggcgacttattctacccacttcgctgctacgtacactgtgtagagaaaagggtagactaggaaaaggacttgcagactcgggctcagccgcggtagcacccatgaccccggacagcgatgcagaagaatgcattctatcgccgccttcctttttccacgtgcgatgatcaaaaagaggtgaaaaaacattactgtccacgtcgtcccacagaaacccgtcattagggtcgggcatgtcatattcgcccgtgtagaaaccaggtgggggcagccagtgcgggtttaggatggcattggtaaaataatcagagttcatagcggcagctctgtgcaagtagtccagcagtttgttaatgaaaggccggttactggcatacatgctgggctccatatttcgcgctgtcatgtccaatgccgcagtcggagttgccccctcttgcatcagaaacaatcccacgctctgctgcacatatctaaggatcctctcctcctccgcagtaagagcatattgaggagggatcttctgagaccgattggtaagcaagaagttcagagtggcttccaaactgccagtgtcttcctgacccaaagcgcgactgacttgggtaatttcttgataggtctgctcgtccacctggctttgccctatggcttcgcgatacaggtttagtaggtaacccaaataggaattacggtcgatgctgccgctgtcggtgaaaggagctaccaacagtagtaataggcgggagtttggagttaacaagctagacacggttgctctttctcctaccggggcatgcactccccacaaacctttaaggtttttaaaagcttggctcagatttaccgtctgcaaaccctgtctgctagtctgaaagaagtagtcaggtccggactgatacacttcgctctgaggtacttcagataccatcagtctcaacgcactcaaaaagttagtataatcctgttgaccacgcggcacattagcaggctgagtactcaaaaaagcatttaacgccaccagcgaaccaaggttggcatcgcgctggaacctttcacgctgagacacggcttcgcgtacatctgttatcatacggtccaaattggtttgcacattgctactgttgtagcgagccacgcgttctaaaagagcgttgtataccagtccggcctcatctggacgaatagctttgttctccaccaacgcgtttacaatggccaggaccttctcatgagtgggattagagcgggaaggcactacagcttccatgatggccgatagacggttggcctggggttgctgtctaaaggcttcggggttgcgagtcgtcaacgccatgatacgttgcatggcctgggtccaatcgtccgaggagttaatgccggacggctggctctgcagcgccgcccgcgttgcgggatccggtgcttgctgttccatctagcaaaaaacacgggttgtgccatcagtcttccaagtactcgccctcttcctcctcgccttcatccgcctcttctatgtaaggaagctcacatcctgccgtcgcggcgctcagagccctgcgactaggctgccactgcaagtcagctcccatgtcaaagtaattctcaccctctgttccagctccagtcagagctctttgcaaactgtgcatcagttccctgtcgcttaactcgcgcctcctactggcgctaacggcgcgatgcattctgtcattgcggtacaccccaagatcatcgctcagggtcaagaccttgagcgtcatacgcatgtagaacccatctatcttcacctccttgtctatgggaacgtatggagtcttgtagatcttgcgagcgtaatattttcccaaacttaaaaccgagtaattgatggcagccaccttttcggccaggcccaggctccgctcctgcactatgatactctgtagaatgttgataagatcatacaaccatctcccctcgggttcagtgatgttgagcagtgcctctctgaaagcctcgttgtctctgctgtgttgcaccaccagaaacagctgtgcggtcagaggtttgctagtagggttctgaatgatagcttccatcaaatcccacaaatgcatcaaaccaagagtaacttcttcgcgggcaatcagggttcgcacatgattattaaaagacttttggaagttacgctcttcctttactgtctgctcgtaagccgatacaaggttggctgcagccacgtgtgccctggcaggactgatccctgtcacttcatcaacttcgaaatcctcgtcccgcaacactcgtcttcggtccaaaccgtgacgcagctcacgacccgcgttaaagcgggaagctcgcatctcctccggctcctcgccgcttctgtctctaaataggttctgttggggcacatacgcctcgcgagaatcttttttcagttgaactcgcggatgccgctcgggcgagggcgcacctagacgtgccagtccttcgccctcttccaagtccagatcataggcgggctgtcccgcaccgctcacggcggcagttgcagtagttgcagggacagccttttgtggttgctgctgctgcgaggggggctgttgttggggacgcatctgtcgcagcacgggatgcatctgagcggcaaaaaaaaaaataggactcacttccctgccattcagcaaccagcaaaacgactcgattccgtatcctggatttttgtaggctgggtcgagacgggagtgccaataccacgttagccgcggctccggccggctcgagtacaagtcttgaaccggggtacaccgcgacccaacccgttcacgttcctccaggctacagagtcgagtcgctgaacgctttcattttcttcgtgtctatagagcatcaatgactgcgcgcgcctcactggtcaaaccgtgcctacaatgaactacttcatgccgctacgcaacatttggaaccgcgtacgcgagtttcctcgggcttccactaccgccgcaggaatcacctggatgtccaggtacatctacggctatcaccgccttatgttggaagacctcgcccccggcgctccagctacagaacaatggcctctctaccgccaaccaccaccgcattttcttatagggtaccagtatctggtgcgcacctgcaacgattacatttttgacacccgcgcctattcgcgccttaaatacaccgagctcgtgcgccatggtcaccaaacagttaactggtcagtcatggccaactgtgcttacaccatcaataccggggcttaccaccgcttcgtggattttgatgactttcaagccaccctcacccaagtacagcaagccatcctcgccgaaagagttgtagctgacttggcactggtccaaccaatgcgcgggtttggactcacacgtatgcatggcagaacgggtgaagaagaagtgcccgtagaacggctcatgcaagactactacaaagatctggctagatgtcaggataatgcttggggaatggccaatcgcctgcgtatccagcaagccggacccaaagacctggtgctcctcgccaccatccgccgtcttagaactgcctactttaatttcatcaccagcagcatcgtctcaccttcccgagatgaagaaggaatagaagacccagaccgaacacataaccacccccgcccacaagaagccgtactcagcctaccttgtgactgtgactggttagacgctttcgttgaaaggttttcagatcccgtggatcttgacacgattagatctctgcgcgcagtccctacgggccaattaataaaatgtataatcagcgccctttccctcccaaacggagaacctcccagtcaccactttaaggagatgcgcggcggtgtttttactctgcgaccgcgcgagaacggccgcgccgtcactgaaaccatgcgccgccgccgcggagaggtcattgaacgattcatcgaccgtttgcccgtgcgccgtcgacgtcgccgcgtgccccctccgcccccgcctgaagacgaagaagagatgttagtggaagaagagatagaagaggaagaagagatgccgggagccttcgaacgcgaagtacgggccaccatagccgaactcatccgtcttctcgaggaggaattgaccgtgtccgcgcgaaactcccagttttttaattttgccgtggacttctacgaggccatggagcgcttggaagctctgggcgatgtcagcgaaatgccgctgagacgatggatcatgtatttctttgtcgccgaacacatcgccaccacactcaactacctttttcagcgcctatgcaactatgcggtcttcaccagacacgtggagcttaacctcgctcaggtggtgatgcgcgcaagagactccgagggggccgtggtttacagccgcgtctggaacgaggcgggcatgaatgcattctcccaactcatgggccgtatctccaatgacctcgcggccaccgtcgagagagcgggtcgcggagatcttcaggaggaagaaatcgagcagttcatggcggagatcgcctaccaggacaactctggtgacgtacaagaaatactgagacaagctgccgttaacgataccgaaattgattctgttgaactctctttcaggttcaagctcacggggccggtagctttcacccaaagacgtcagatacaagacgtcaatcgacgcgtggtggcgcacgcaagtcttctcagagcgcagtaccagaacctgcccgtgcgcggcgccgacgtgccactaccagccatgcccccgggtccggaacaaccgctgccgcccggcgcgcgtccccgtcaccgcttttaagcatgcaagaagcaagagagccaccaccgatcaaaagaaaaaacaaaggtacggtagtggcacccaaaggacacggaaccctgcaagccattgacgtctctacaaacgaacctgtggaaatcaagtaccatctaaacctcccgcacgccctggaaaagatcatgcaagttaatcttctgtccctacctactaacctgagtccgcagcgtctcaggactctggacagctccagcctgcgcgctctcgtccttcagctccgcccctcccgcgccgaggtctggacttgcctcccgcgggggctcgtcagcatgaccaccatcgaaacagaagatgaacaggccaatacagcgaatatagaagagcacgagatacaatcgccaggcctcggcttcccactgaaatttctcgtcaagggaagccaggtacagctcattcacgagatacaacccgtgcaacgctgcgactactgcggccgtctgtacaagcacaaacacgaatgctcggcgcgccgcagaaacttctacttccatcacatcaacagccaatcctccaactggtggcaggaaatccagtttttcccaatcggctctcatcctcgcacagaaagactcttcctgacctacgatgtggaaacttacacctggatggggtcctttggcaaacaactagttcctttcatgctggtcatgaaactctcaggagaagagcgtctcgtcaacatggcccacgatctagccattaaacttaagtgggatcgatggcaacaagatcccggaaccttctactgtgtcactccagaaaaaatggcaattggccagcattttcgtcagtatcgggaccagttacaaacagcactggcggtggatctttggtcatcattcctacatgcaaatcctcatctgcacgaatgggcccttgaacactacgccttatctgaccctacagacctaacctttgatgagctcaataagctacctcacgtcagaggcacgccgcgtttcatagaattatacattgtaggacacaacatcaacggcttcgacgagatcgtcctagctgcccaggtgatcaacaatcgagcggaagtaccacagccttttcgcatcactcgcaattttatgcccagagccggtaagattctcttcaacgatgttactttcgctttgcccaaccccgcctacaagaaacgggtagacttccaactctgggaacagggagcctgtgacgacatggactttaaataccaatttgtcaaagtcatggttagagacaccttcgcccttactcacgcttcgctacgaaaagctgctcaagcatactctctacccgtagagaagggctgctgcccttacaaggcagttaatcagttctacatgctaggatcttaccgtgcagacaaagacgggtttccgctagaagagtactggaaggatcgcgaagaataccttctcaaccgcgaactgtgggaaaagaaaaaccaaccaggttatgacatcattcaagaaacacttgactactgcgccctggacgtacttgtcaccgcccaactggtaaccaagcttgaagaatcttatgcccactttatcagagactctgtaggtctacctcatgcccacttcaacatttttcaaagacccaccatctcttccaattctcacgccatctttcgccagattgtctacagaacagaaaaacccaatcgcaccaacttgggtccggggctgctagcgccgtcacatgaactatatgactatgtgcgagcaagtatcagaggggggcgatgctatccaacctacataggcatctttgaggatcccatctacgtctatgacatctgtggcatgtatgcctctgcactcacccatcccatgccctggggcagtccccttaacccatatgagcgcgcactggcagctcgagaatggcaaatggccttagatgaccccactcccatcagctattttgataaggatttacttcctggaatctttaccatggatgcagaccctcccgatgaacttatgctagacccacttccacctttctgttctaggaaaggaggtaggctctgctggaccaacgaaccccttcgaggcgaggtggccaccagtgtggatttaattaccttgcataaccgagggtggcaagtgagaattgtgccagatgaattgacaactatcttccccgaatggaagtgcctggcacgcgaatatgtccaactcaacatcgctgccaaagagcgcgcggacaaggaaaagaaccaaaccatgcgatccattgccaaacttttatccaacgccctgtatggatcatttgccaccaaacttgacaataaaaaaattgtgttttctgaccaaatggacgaaaacctcatgaaaggcatctcaagcggcactgtcaatatcaaatcctcctcgttcttagaaactgacaacctgagtgcagaggtcatgcccgccttcgagagggaatacctaccccaacagctgacgttcctggacagcgatccggaagacagtgaggaagagcagagaaccgcccccttttatacccccccagctgggaccccaggtcacgtgaaatacacctacaagccaatcacattcctggatgttgaagagagtgacatgtgtttgcatactttggaaaaggtggaccccctggttgacaacgatcgctacccctcccacatagcctcctttgtgctggcctggacgcgcgcctttgtatcagagtggtcagagttcctatacgaagaagaccgaggcactccactggaaaagaggcctgtaaaatcagtctacggggacacggacagcctgtttgtcactcaacgaggacacgaactcatggagaccaaaggtaagaaacgcatcaaaaaatatggcggaaaacttgtttttgaccccaatgaaccggatttaacctggctggtggaatgtgaaactgtttgcgcctcctgcggcgcggatgcatactccccagaatccattttccttgcgcccaagctgtatgcgctgaaatgcctatactgcccggtatgcaagaaaacttccaaaggtaagctccgcgccaagggccacgcagccgaggcgctcaactacgaactcatggtaaactgctacttggccgacatacagggcgccaagcggcacaagttttcgaccagcaggatgagtctgaagcgcaccctggcaagcgcccaagcaggcgcacaccccttcactgtgacggaaacaaccctgacccgaactttgagaccctggaaggaccgaaccctggcagcgctggacgcccatcgtctcataccctactccaggagccgtccaaacccgcgaaacgaggaggtctgctggatcgagatgccatagaacacatcactgaactgtggaacagactagaacttttgcaacagactctctccaaaatgcccatggctgacggtctaaaaccgctgaaaaacttttcctcactacaagaacttctatcactaggaggagagcgcctcctaatggatttggtgcgggaaaatatgcatgtaagggaaatgatgaacgaggtggcccccttgcttcgagaagacggcagttgccgttccctaaactaccaactgcaacctgtaatcggaatcatttatggccccaccggatgtggcaaatctcaattgctcagaaacttgctatcatcccaactaattaccccagccccagaaacggtgttctttatagccccccaggtggacatgattccaccctcggaactgaaagcttgggaaatgcaaatctgtgaggggaactatgctccggggcccgaaggaacattcataccccaatcgggtactctccgtcccaaatttattaaaatggcctatgatgatttaactcaggaacataactatgatgtgtcagacccacggaacgtgtttgcccgcgctgctgcccacggccctattgctattatcatggatgagtgcatggaaaatctcggaggacacaagggtgtctccaaatttttccacgcttttccatccaagctgcacgataaatttcctaaatgtaccggatacaccgtcttggtggtacttcataacatgaacccaagacgagatcttggcggcaatattgccaacttaaaaatccaatccaaaatgcacataatttcaccccgaatgcacccctcccagctcaaccggtttgtaaacacctacaccaagggcttatctgtggcaatcagcctacttctaaaagatattgtgcaacaccatgcacagcgaccttgttatgactgggtaatttacaacactaccccggagcatgaatcccttcaatggagctatctccaccccaaagacggcctaatgcccatgtatctaaacattcaatcccacctttataggattttggaaaaaatccaccgtgttctcaatgatcgagatcggtggtctagggcataccgtgcgcgaaaaatgaaataaaaaacacttgattttaaatcaa

SEQ ID NO: 60 - DNA, 3748 bp, Unknown
  Description of Unknown: Human adenovirus 14 sequence
tataaaacgcctgatgattagaggccgaggtattcagcttaacgacgagtcggtgagctctccgcttggtctacgaccagacggaatctttcaaattgccggctgcgggagatcttccttcacccctcgtcagactgttttgactttggaaagttcgtcttcgcaaccccgctcgggcggaatcgggaccgttcaatttgtggaggagtttactccctctgtctacttcaaccctttctccggatctcctgggcactacccggacgagttcataccgaactttgacgcaattagcgagtcagtggacggctacgattgatgtctggtgacgcggctgagctatctcggctgcgacatctagaccactgccgccgctttcgctgttttgcccgggaactcattgagttcatttacttcgaactccccaaggatcaccctcaaggtccggcccacggagtgcggattactatcgaaggtaaaataaactctcgcctgcatcgaattttctcccagcggcccgtgctgatcgagcgagaccagggaaacaccacggtttctatctactgcatttgtaatcacccaggattgcatgaaagcctttgctgtcttatgtgtactgagtttaataaaaactgaattaagactctcctacggactgccgcttcttcaacccggattttacaaccagaagaacgaaacttttcctctcatccaggactctgttaactttacctttcctacttacaaaccagaagctcaacgacaacaccgcttttccagaagcattttccctactaatactactttcaaaaccggaggtgagctccacagtctccccgcagaaaacccttgggtggaagcgggccttgtagtgctaggaattcttgcgggcgggcttgtgattattctttgctacctatacacaccttgcttcactttcctagtggtgttgtggtattggtttaaaaaatggggcccatactagtcttgcttgttttactttcgcttttgggaccgggttctgccaactacaatccatgtctagactttgacccagaaaactgcacacttacttttgcacccgacacaagccgcatctgtggagttcttattaagtgcggatgggaatgcaggtccgttgaaattacacacaataacaaaacctggaacaataccttatccaccacatgggagccaggagttcccgagtggtacactgtctctgtccgaggtcctgacggttccatccgcattagtaacaacacttttattttttctacaatgtgcgatctggccatgttcatgagcaaacagtattctctatggcctcccagcaaggacaacattgtaacgttctccattgcttattgcttgtgcgcttgccttcttactgctttactgtgcgtatgcatacacctgcttgtaaccactcgtatcaaaaacgccaataacaaagaaaaaatgccttaacctctttctgtttacagacatggcttttcttacagctctcatacttgtcagcattgtcactgccgctcacggacaaacagtcgtctctatccctctaggtcataattacactctcataggacccccaatcacttcagaggtcatctggaccaaactgggaagcgttgattactttgatataatctgtaacaaaacaaaaccaataatagtaacctgcaacatacaaaatcttacattaattaatgttagcaaagtttacagcggttactattatggttatgacagatacagtagtcaatatagaaattacttggttcgtgttacccagtccaaaaccacgaaaatgccaaatatggcagaaattcgatccgatgacaattctctagaaacttttacatcttccaccacacctgacgaaaaaaatatcccagattcaatgattgcaattatcgcagcggtggcagtggtgatggcactaacagtaatatgcatgcttttatatgcttgtcgctacaaaaagtttcatcctaaaaaacaagatctcctactaaggcttaacatttaatttctttttacacagccatggtttccactaccacattccttatgcttactagtatagcaactctgacttctgctcgctcacacctcactgtaactataggctcaaactgcacactaaaaggacctcaaggtggtcatgtcttttggtggagaatatatgacaatggatggtttacaaaaccatgtgaccaacctggtagatttttctgcaacggcagagacctaaccattatcaacgtgacagcaaatgacaaaggcttctattatggaaccgactataaaagtagtttagattataacattattgtactgccatccaccactccagcgccccgcaaaactactttctctagcagcagtgccgctaacaatacaatttccaatccaacctttaccgcgcttttaaaacgcactgtgaataattctacaacaatttccacttcaacaatcagcatcatcgctgccgtgacaattggaatatctattcttgtttttaccataacctactacacctgctgctataaaaaagacgaacataaaggtgatccattacttagatttgatatttaatttgttctttttttttttatttacagtatggtgaacaccaatcatggtacctagaaatttcttcttcaccatactcatctgtgcttttaatgtttgcgctactttcacagcagtagccacagcaagcccagactgtataggagcatttgcttcctatgcactttttgcttttgtcacttgcatctgcgtatgtagcatagtctgcctggttattaattttttccaacttctagactggatccttgtgcgaattgcctacctgcgccaccatcccgaataccgcaaccaaaatatcgcggcacttcttagacttatctaaaaccatgcaggctatactaccaatatttttgcttctattgcttccctacgctgtctcaaccccagctacctatagtactccaccagaacaccttagaaaatgcaaattccaacaaccgtggtcatttcttgcttgctatcgagaaaaatctgaaattcccccaactttaataatgattgctggaataattaatgtaatctgttgcaccataatttcatttctgatataccccctatttgattttggctggaatgctcccaatgcacatgattattcccaagacccagaggaacacattcccctacataacatgcaacaaccaatagcgctaatagaatacgaaagtgaaccacaacccccactactccctgctattagttacttcaacctaaccggcggagatgactgaaacactcaccacctccaattccgccgaggatctgcttgatatggacggccgcgtctcagaacagcgactcgcccaactacgcatccgccagcagcaggaacgcgtggccaaagagctcagagatgtcatccaaattcaccaatgcaaaaaaggcatattctgtttggtaaaacaagccaaaatatcctacgagatcaccgctaccgaccatcgcctctcttacgagcttggcccccaacgacaaaaatttacctgcatggtgggaatcaaccccatagttatcacccaacaaagtggagatactaagggttgcattcactgctcctgcgattccatcgagtgcacctacaccctgctgaagaccctatgcggactaagagacctgctacccatgaattaaaaaaatgattaataaa

SEQ ID NO: 61 - DNA, 978 bp, Unknown
  Description of Unknown: Human adenovirus 14 sequence
atgaccaagagagtccggctcagtgactccttcaaccctgtctacccctatgaagatgaaagcacctcccaacacccctttataaacccagggtttatttccccaaatggcttcacccaaagcccagacggagttcttactttaaaatgtttaaccccgctaacaaccacaggcgggtctctacagctaaaagtgggagggggacttacagtagatgacactgatgggaccttacaagaaaacataggtgccaccacaccacttgttaagactgggcactctataggtttatccctaggagccggattgggaacagatgaaaataaactttgtaccaaattgggagaaggacttacattcaattcaaacaacatttgcattgatgacaatattaacaccctgtggacaggagttaaccccaccgaagccaactgtcaaatgatggactccagtgaatctaatgattgcaaattaattctaacactagttaaaactggagccctagtcactgcatttgtttatgttataggagtatctaacaattttaatatgctaactacatacagaaatataaattttactgcggagctgttttttgattctgcgggtaatttactaactagcctgtcatccctaaaaactccacttaatcataaatcaggacaaaacatggctactggtgccattactaatgctaaaagtttcatgcccagcacaactgcttatcctttcaataataattctagagaaaaagaaaactacatttacggaacttgtcactacacagctagtgatcacactgcttttcccattgacatatctgtcatgcttaaccaaagagcaataagagctgatacatcatattgtattcgtataacttggtcctggaacacaggagatgccccagaggggcaaacctctgctacaaccctagttacctccccatttaccttttactacatcagagaagacgactga

SEQ ID NO: 62 - DNA, 126 bp, Unknown
  Description of Unknown: Human adenovirus 14 sequence
atgaccaagagagtccggctcagtgactccttcaaccctgtctacccctatgaagatgaaagcacctcccaacacccctttataaacccagggtttatttccccaaatggcttcacccaaagccca

SEQ ID NO: 63 - DNA, 273 bp, Unknown
  Description of Unknown: Human adenovirus 14 sequence
gacggagttcttactttaaaatgtttaaccccgctaacaaccacaggcgggtctctacagctaaaagtgggagggggacttacagtagatgacactgatgggaccttacaagaaaacataggtgccaccacaccacttgttaagactgggcactctataggtttatccctaggagccggattgggaacagatgaaaataaactttgtaccaaattgggagaaggacttacattcaattcaaacaacatttgcattgatgacaatattaacacc

SEQ ID NO: 64 - DNA, 576 bp, Unknown
  Description of Unknown: Human adenovirus 14 sequence
ctgtggacaggagttaaccccaccgaagccaactgtcaaatgatggactccagtgaatctaatgattgcaaattaattctaacactagttaaaactggagccctagtcactgcatttgtttatgttataggagtatctaacaattttaatatgctaactacatacagaaatataaattttactgcggagctgttttttgattctgcgggtaatttactaactagcctgtcatccctaaaaactccacttaatcataaatcaggacaaaacatggctactggtgccattactaatgctaaaagtttcatgcccagcacaactgcttatcctttcaataataattctagagaaaaagaaaactacatttacggaacttgtcactacacagctagtgatcacactgcttttcccattgacatatctgtcatgcttaaccaaagagcaataagagctgatacatcatattgtattcgtataacttggtcctggaacacaggagatgccccagaggggcaaacctctgctacaaccctagttacctccccatttaccttttactacatcagagaagacgac

SEQ ID NO: 65 - DNA, 1677 bp, Unknown
  Description of Unknown: Human adenovirus 14 sequence
atgaggcgagtcgtgctaggcggagcggtggtgtatccggagggtcctcctccttcgtacgagagcgtgatgcagcagcagcaggcgacggcggtgatgcaatccccactggaggctccctttgtacctccgcgatacctggcacctacggagggcagaaacagcattcgttactcggaactggcacctcagtacgataccaccaggttgtatctggtggacaacaagtcggcggacattgcttctctgaactatcagaatgaccacagcaacttcttgaccacggtggtgcagaacaatgactttacccctacggaagccagtacccagaccattaactttgatgaacgatcgcggtggggcggtcagctaaagaccatcatgcatactaacatgcccaacgtaaacgagtatatgtttagtaacaacttcaaagcgcgtgtgatggtgtccagaaaacctcccgaaggtgctgcagttggggatacatatgatcacaagcaggatattttggaatatgagtggttcgagtttactttgccagaaggcaacttttcagttactatgaccattgatttgatgaacaatgccatcatagataactacttgaaagtgggcagacagaatggagtgcttgaaagtgacattggtgttaagttcgacaccaggaacttcaagctgggatgggatcccgaaaccaagttgattatgcctggagtgtatacgtatgaagcctttcatcctgacattgtcttactgcctggctgtggagtggactttaccgaaagtcgtttgagcaaccttcttggtatcagaaaaaaacagccatttcaagagggttttaagattttgtatgaagatttagaaggaggtaatattccggccctcttggatgtagatgcctatgagaacagtaagaaagaacaaaaagccaaaatagaagctgctgcggaagctaaggcaaacatagttgccagcgactttacaagggttgctaacgctggagaggtcagaggagacaattttgcaccaacacctgttccgactgcagaatcattattggccgatgtaactggaggaacggacgtgaaactcactattcaacctgtagaaaaagatagtaagaatagaagctataatgtgttggaagataaaatcaacacagcctatcgcagttggtacctttcgtacaattatggcgatcccgaaaaaggagtgcgttcctggacattgctcaccacctcagatgtcacctgcggagcagagcaggtctactggtcgcttccagacatgatgcaggatcctgtcactttccgctccactagacaagtcagcaactaccctgtggtgggtgcagagcttatgcccgtcttctcaaagagcttctacaacgaacaagctgtgtactcccagcagctccgccagtccacctcgcttacgcacgtcttcaaccgctttcctgagaaccagattttaatccgtccgccggcgcccaccattaccaccgtcagtgaaaacgttcctgctctcacagatcacgggaccctgccgttgcgcagcagtatccggggagtccaacgtgtgaccgttactgacgccagacgccgcacctgtccctacgtgtacaaggcactgggcatagtcgcaccgcgcgtcctttcaagccgcactttctaa

SEQ ID NO: 66 - DNA, 2838 bp, Unknown
  Description of Unknown: Human adenovirus 14 sequence
atggccaccccatcgatgctgccccagtgggcatacatgcacatcgccggacaggatgcttcggagtacctgagtccgggtctggtgcagttcgcccgcgccacagacacctacttcaatctgggaaataagtttagaaatcccaccgtagcgccaacccacgatgtgaccaccgaccgtagccagcggctcatgttgcgcttcgtgcccgttgaccgggaggacaatacatactcttacaaagtgcggtacaccctggccgtgggcgacaacagagtgctggatatggccagcacgttctttgacattaggggcgtgttggacagaggtcccagtttcaaaccctattctggtacggcttacaactctctggctcctaaaggcgctccaaatgcatctcagtggttggataaaggggttgaaactactgaagaacggcaaaatgaagacggggaaaatgacgaaaaagctacatacacttttggcaatgccccagtaaaagccgatgctgacattacaaaagacggactaccaataggtttggaagtcccagctgaaggtgaccctaaacctatctacgctaataagctttaccaaccagaaccccaggtgggacaggaatcgtggactgatacagatggcactgaagaaaaatacggaggcagagtacttaaaccggacactaaaatgaaaccgtgctatgggtcttttgctaaacctactaatgtgaaaggcggacaggcaaaagtgaaaacagaagaaggcaacaacattgaatatgacattgacatgaacttttttgacttaagatcacaaaaacaaggtcttaaacctaagattgtaatgtatgcagaaaatgtggacctggaatctccagatactcatgttgtgtacaaacctgaagtttcagatgctagttcaaatgctaatcttggacagcagtctatgcccaacagacccaactacattggcttcagagataattttattggtcttatgtactataacagtactggtaacatgggggtgctggctggccaagcatctcagttgaatgcagtggttgacttgcaggacagaaacacagaactgtcttaccaactcttgcttgactccctgggcgatagaaccagatactttagcatgtggaatcaggctgttgacagttatgatcccgatgtgcgtgttattgaaaatcatggtgtggaagatgaacttcccaactactgttttccactggacggcatcggtccgcgaacagatagttacaaggagattcagttaaatggagaccaagcttggaaagatgtaaatccaaatggtatcagtgaacttgttaagggaaatccatttgccatggaaattaaccttcaagccaatctatggcgaagtttcctttattccaatgtggctctgtatctcccagactcgtacaaatacaccccgtccaatgtcactcttccagaaaacaaaaacacctacgactacatgaacgggcgggtggtgccgccatctctagtagacacctatgtgaacattggcgccaggtggtctctggatgctatggacaatgtcaacccattcaaccaccaccgtaacgctggcttgcgttaccgatccatgcttttgggtaacggacgttatgtgcctttccacatacaagtgcctcaaaaattcttcgctgtcaaaaacctgctgcttctcccaggctcctacacttatgagtggaacttcaggaaggatgtgaacatggtgctacagagttccctcggtaacgacctacgggtagatggcgccagcatcagtttcacgagcatcaacctctatgctacctttttccccatggctcacaacaccgcttccacccttgaagccatgctgcggaatgacaccaatgatcagtcattcaacgactatctatctgcagctaacatgctctatcccattcctgccaatgcaaccaatattcccatttccattccttctcgcaactgggcggctttcagaggctggtcatttaccagactcaaaaccaaagaaactccctctttggggtctggatttgacccctactttgtctattctggttctattccctacctggatggtaccttctacctgaaccacacttttaagaaggtttccatcatgtttgactcttcagtgagctggcctggaaatgacaggttactatctcccaacgaatttgaaataaagcgcactgtggatggcgaaggctacaatgtagcccaatgcaacatgaccaaagactggttcttggtacagatgctcgccaactacaacataggctatcagggcttctacattccagaaggatacaaagatcgcatgtattcatttttcagaaacttccagcccatgagcaggcaggtggttgatgaggtcaattacaaagacttcaaggccgtcgccataccctaccaacacaacaactctggctttgtgggttacatggctccgaccatgcgccaaggtcaaccctatcccgctaactatccctatccactcattggaacaactgccgtaaatagtgttacgcagaaaaagttcttgtgtgacagaaccatgtggcgcataccgttctcgagcaacttcatgtctatgggggcccttacagacttgggacagaacatgctttatgccaactcagctcatgctctggacatgacctttgaggtggatcccatggatgagcccaccctgctttatcttctcttcgaagttttcgacgtggtcagagtgcatcagccacatcgcggcatcatcgagacagtctacctgcgtacaccgttctcggccggtaacgctaccacgtaa

SEQ ID NO: 67 - protein, 325 aa, Unknown
  Description of Unknown: Human adenovirus 14 sequence
MTKRVRLSDSFNPVYPYEDESTSQHPFINPGFISPNGFTQSPDGVLTLKCLTPLTTTGGSLQLKVGGGLTVDDTDGTLQENIGATTPLVKTGHSIGLSLGAGLGTDENKLCTKLGEGLTFNSNNICIDDNINTLWTGVNPTEANCQMMDSSESNDCKLILTLVKTGALVTAFVYVIGVSNNFNMLTTYRNINFTAELFFDSAGNLLTSLSSLKTPLNHKSGQNMATGAITNAKSFMPSTTAYPFNNNSREKENYIYGTCHYTASDHTAFPIDISVMLNQRAIRADTSYCIRITWSWNTGDAPEGQTSATTLVTSPFTFYYIREDD

SEQ ID NO: 68 - protein, 91 aa, Unknown
  Description of Unknown: Human adenovirus 14 sequence
DGVLTLKCLTPLTTTGGSLQLKVGGGLTVDDTDGTLQENIGATTPLVKTGHSIGLSLGAGLGTDENKLCTKLGEGLTFNSNNICIDDNINT

SEQ ID NO: 69 - protein, 192 aa, Unknown
  Description of Unknown: Human adenovirus 14 sequence
LWTGVNPTEANCQMMDSSESNDCKLILTLVKTGALVTAFVYVIGVSNNFNMLTTYRNINFTAELFFDSAGNLLTSLSSLKTPLNHKSGQNMATGAITNAKSFMPSTTAYPFNNNSREKENYIYGTCHYTASDHTAFPIDISVMLNQRAIRADTSYCIRITWSWNTGDAPEGQTSATTLVTSPFTFYYIREDD

SEQ ID NO: 70 - protein, 558 aa, Unknown
  Description of Unknown: Human adenovirus 14 sequence
MRRVVLGGAVVYPEGPPPSYESVMQQQQATAVMQSPLEAPFVPPRYLAPTEGRNSIRYSELAPQYDTTRLYLVDNKSADIASLNYQNDHSNFLTTVVQNNDFTPTEASTQTINFDERSRWGGQLKTIMHTNMPNVNEYMFSNNFKARVMVSRKPPEGAAVGDTYDHKQDILEYEWFEFTLPEGNFSVTMTIDLMNNAIIDNYLKVGRQNGVLESDIGVKFDTRNFKLGWDPETKLIMPGVYTYEAFHPDIVLLPGCGVDFTESRLSNLLGIRKKQPFQEGFKILYEDLEGGNIPALLDVDAYENSKKEQKAKIEAAAEAKANIVASDFTRVANAGEVRGDNFAPTPVPTAESLLADVTGGTDVKLTIQPVEKDSKNRSYNVLEDKINTAYRSWYLSYNYGDPEKGVRSWTLLTTSDVTCGAEQVYWSLPDMMQDPVTFRSTRQVSNYPVVGAELMPVFSKSFYNEQAVYSQQLRQSTSLTHVFNRFPENQILIRPPAPTITTVSENVPALTDHGTLPLRSSIRGVQRVTVTDARRRTCPYVYKALGIVAPRVLSSRTF

SEQ ID NO: 71 - protein, 945 aa, Unknown
  Description of Unknown: Human adenovirus 14 sequence
MATPSMLPQWAYMHIAGQDASEYLSPGLVQFARATDTYFNLGNKFRNPTVAPTHDVTTDRSQRLMLRFVPVDREDNTYSYKVRYTLAVGDNRVLDMASTFFDIRGVLDRGPSFKPYSGTAYNSLAPKGAPNASQWLDKGVETTEERQNEDGENDEKATYTFGNAPVKADADITKDGLPIGLEVPAEGDPKPIYANKLYQPEPQVGQESWTDTDGTEEKYGGRVLKPDTKMKPCYGSFAKPTNVKGGQAKVKTEEGNNIEYDIDMNFFDLRSQKQGLKPKIVMYAENVDLESPDTHVVYKPEVSDASSNANLGQQSMPNRPNYIGFRDNFIGLMYYNSTGNMGVLAGQASQLNAVVDLQDRNTELSYQLLLDSLGDRTRYFSMWNQAVDSYDPDVRVIENHGVEDELPNYCFPLDGIGPRTDSYKEIQLNGDQAWKDVNPNGISELVKGNPFAMEINLQANLWRSFLYSNVALYLPDSYKYTPSNVTLPENKNTYDYMNGRVVPPSLVDTYVNIGARWSLDAMDNVNPFNHHRNAGLRYRSMLLGNGRYVPFHIQVPQKFFAVKNLLLLPGSYTYEWNFRKDVNMVLQSSLGNDLRVDGASISFTSINLYATFFPMAHNTASTLEAMLRNDTNDQSFNDYLSAANMLYPIPANATNIPISIPSRNWAAFRGWSFTRLKTKETPSLGSGFDPYFVYSGSIPYLDGTFYLNHTFKKVSIMFDSSVSWPGNDRLLSPNEFEIKRTVDGEGYNVAQCNMTKDWFLVQMLANYNIGYQGFYIPEGYKDRMYSFFRNFQPMSRQVVDEVNYKDFKAVAIPYQHNNSGFVGYMAPTMRQGQPYPANYPYPLIGTTAVNSVTQKKFLCDRTMWRIPFSSNFMSMGALTDLGQNMLYANSAHALDMTFEVDPMDEPTLLYLLFEVFDVVRVHQPHRGIIETVYLRTPFSAGNATT

SEQ ID NO: 72 - protein, 42 aa, Unknown; identical to SEQ ID NO: 36
  Description of Unknown: Human adenovirus 14 sequence

SEQ ID NO: 73 - DNA, 114 bp, Unknown
  Description of Unknown: Human adenovirus 16 sequence
cattatctataatataccttatagatggaatggtgccaacatgtaaatgaggtaatttaaaaaagtgcgcgctgtgtggtgattggctgcggggtgaacggctaaaaggggcgg

SEQ ID NO: 74 - DNA, 114 bp, Unknown
  Description of Unknown: Human adenovirus 16 sequence
ccgccccttttagccgttcaccccgcagccaatcaccacacagcgcgcacttttttaaattacctcatttacatgttggcaccattccatctataaggtatattattgataatg

SEQ ID NO: 75 - DNA, 365 bp, Unknown
  Description of Unknown: Human adenovirus 16 sequence
gcaatgctgggatgtgacgtaacttatgtgggaggagttatgttgcaagttatcgcggtaaaggtgacgtaaaacgaggtgtggtttggacacggaagtagacagttttcccacgtttactgacaggatatgaggtagttttgggcggatgcaagtgaaaattctccattttcgcgcgaaaactgaatgaggaagtgaatttctgagtcatttcgcggttatgacagggtggagtatttgccgagggccgagtagactttgaccgtttacgtggaggtttcgattaccgtgtttttcacctaaatttccgcgtacggtgtcaaagtcctgtgtttttacgtaggtgtcagctgatcactagggta

SEQ ID NO: 76 - DNA, 3431 bp, Unknown
  Description of Unknown: Human adenovirus 16 sequence
tttaaacctgtcgagttccgtcaagaggccactcttgagtgccagcgagaagagttttctcctccgcgctgcgagtcagttttgcgctttgaaaatgagacacctgcgattcctgccacaggagattatctccagcgagaccgggatcgaaatactggagtttgtggtaaataccctgatgggagatgacccggaaccgccagtgcagcctttcgatccacctacgctgcacgatctgtatgatttagaggtagacgggcctgatgatcccaatgaggaagctgtaaatgggttttttactgattctatgctgctagctgccgatgaaggattggacataaaccctcctcctgagacccttgataccccaggggtggttgtggaaagcggcagaggtgggaaaaaattgcctgatctgggagcagctgaaatggacttgcgttgttatgaagagggttttcctccgagtgatgatgaagacggggaaactgaacagtccatccataccgcagtgaatgagggagtaaaagctgccagcgatgtttttaagttggactgtccggagctgcctggacatggctgtaagtcttgtgaatttcacaggaataacactggaatgaaagaactattgtgctcgctttgctatatgagaatgcactgccactttatttacagtaagtgtatttaagtgaaatttaaaggaatagtgtagctgtttaataactgttgaatggtagatttatgtttttgcttgcgattttttgtaggtcctgtgtctgatgatgagtcaccttctcctgattcaactacctcacctcctgaaattcaggcgcccgtacctgcaaacgtatgcaagcccattcctgtgaagcctaagtctgggaaacgccctgctgtggataagcttgaggacttgttggagggtggggatggacctttggaccttagtacccggaaactgccaaggcaatgagtgccctgcagctgtgtttatttagtgacgtcatgtaataaaattatgtcagctgctgagtgttttattgcttcttgggtggggacttggatatataagtaggagcagatctgtgtggttagctcatagcaacctgctgccatccatggaggtttgggctatcttggaagacctgagacagactaggctactgctagaaaacgcctcggacggagtctctggcttttggagattctggttcggtggcgatctagctaggctagtgtttaggataaaacaggactatagggaagaatttgaaaagttattggacgacagtccaggactttttgaagctcttaacttgggccatcaggctcattttaaggagaaggttttatcagttttagatttttctactcctggtagaactgctgctgctgtagcttttcttacttttatattggataaatggatccgccaaacccacttcagcaagggatacgttttggatttcatagcagcagctttgtggagaacatggaaggctcgcaggatgaggacaatcttagattactggccagtgcagcctctgggagtagcagggatactgagacacccaccggccatgccagcggttctggaggaggagcagcaggaggacaatccgagagccggcctggaccctccggtggaggagtagctgacttgtttcctgaactgcgacgggtgcttactaggtctacgtccagtggacaggacaggggcattaagagggaaaggaatcctagtgggaataattcaagaaccgagttggctttaagtttaatgagccgtaggcgtcctgaaactgtttggtggcatgaggttcagagcgaaggcagggatgaagtttcaatattgcaggagaaatattcactagaacaacttaagacctgttggttggaacctgaggatgattgggaggtggccattaggaattatgctaagatatctctgaggcctgataaacagtatagaattactaagaagattaatattagaaatgcatgctacatatcagggaatggggcagaggttataatagatacacaagataaagcagcttttagatgttgtatgatgggtatgtggccaggggttgtcggcatggaagcagtaacatttatgaatattaggtttaaaggggatgggtataatggcattgtatttatggctaacactaagctgattctacatggttgtagcttttttgggtttaataatacttgtgtagaagcttgggggcaagttagtgtgaggggttgtagtttttatgcatgctggattgcaacatcaggtagggtcaagagtcagttgtctgtgaagaaatgcatgtttgagagatgtaatcttggcatactgaatgaaggtgaagcaagggtccgccactgcgcagctacagaaactggctgcttcattctaataaagggaaatgccagtgtgaagcataatatgatctgtggacattcgaatgagaggccttatcagatgctgacctgcgctggtggacattgcaatattctggctaccgtgcatatcgtttcccatgcacgcaagaaatggcctgtatttgaacataatgtgattaccaagtgcaccatgcacataggtggtcgcaggggaatgtttatgccttaccagtgtaacatgaatcatgtgaaggtgatgttggaaccagatgccttttccagagtaagcttaacaggaatctttgatatgaatattcaactatggaagatcctgagatatgatgacactaaaccgagggtgcgcgcatgcgaatgcggaggcaagcatgctagattccagccggtgtgcgtggatgtgactgaagacctgagacccgatcatttggtgcttgcctgcactggagcggagttcggttctagtggtgaagaaactgactaaagtgagtagtgggacgagctgtggaggtgggactttgaggttggtaaggtgggcagattgggtaaattttgttaatttctgtcttgcagctgccatgagtggaagcgcttcttttgaggggggagtatttagcccttatctgacgggcaggctcccaccatgggcaggagttcgtcagaatgtcatgggatccactgtggatgggagacccgtccagcccgccaattcctcaacgctgacctatgccactttgagttcgtcaccattggatgcagctgcagccgccgccgctactgctgccgccaacaccatccttggaatgggctattacggaagcatcgttgccaattccagttcctctaataacccttcaaccctggctgaggacaagctacttgttctcttggctcagctcgaggccttaacccaacgcttaggcgaactgtctaagcaggtggcccagttgcgtgagcaaactcagtctgctgttgccacagcaaagtctaaataaagatcttaaatcaataaa

SEQ ID NO: 77 - DNA, 19627 bp, Unknown
  Description of Unknown: Human adenovirus 16 sequence
atggccagccgcggaggaaatcagtcaagcgaccgccaacgggagcacacccccgaacgcggaatgggctctgccagccatccgcctccaaggccagaccgcagcccatctcagtcgcctccacctctgcccccgaagaggaacacctaccgtcgcgtggggtccgattcttctatcgagagccaggtggtactggtaagcgaaacttcgcggtcatccctgtctccggaacggagcaacagtcctcccccgatccctcccaagaagaagcccaggaagaccaagcatgtccctctgcaagacatcagccaggacagcgaagaagaaagagaacaggctcagttggtggccgtgggcttcagctaccccccggtgcgcatcattgagaaggatggcaagagaagtgttgagaagatcgacaagaatgaccctatagctaaaggagctacttctattgctgttaggaatcctttgagcttgcccctggtatctgcctgggagaagggcatggaagtgatggctgtgctaatggagaggtataggctggataatgacctgagaacctctttcaagctgatgccagagcagcacgagcagtacaagcgtatctgccaccagtatgtgaacgaggagcaccgtggcattccgctgacatttagtagcatgaagaccctgacagcgatgatgggaagattcatgcagggattggtgcattcttattctgagatcgcccacaataattgggagtgcaccgggtgcgctctgtgggctcatggatgcaccgattacgaaggcaaggtgaaatgcctgcatggcactatcatgatccagaaggaccacattatcgagatggatgtggcgagcgagaacgggcagcgcgctatgaaggagaacccagacagagccaagatcacccagaaccgctggggcagaaatgtggttcagttggccaacaacgatgcccgctgctgtgtaaatgatgccaactgtgctactaaccaattttccagcaagtcctgtggaatgttctacaccgagggaagtaaggctcaggaagctttcaagcagtacgaagccttcatgaaggccgtatatccagggataacccccgaccaagccaggatgatgctgattcccattcattgcgattgcaaccacaagccaggctgcgctcccgtgatgggcaggcagacctgtaagatgaccccctttgggatggccaatgctgaagacttggatgtgactaccatcagtgacccgaccgtgctggcaagcgtgagacacccagccttgatggtgttccagtgttgcaacccagtgtaccgcaactcccgtgtccagaatgccggccccaactgtgatttcaagatctctgctcctgacctgcttggcgccctgcaactgaccagaaagttgtggcaagacacctttcccgagattccagttcccaagctggtgatccccgagttcaagtggcagaacaggttacagttccgcaacgtatccctgcccgcgggccactatgactcccgccagaacccatttgatttctgagtgaatgatgaaaacgaatgagcaaaaaaccagagccttagtgcatgtaaaaataaagtgctttttattgaacacggttttacatgacttattgcatatccatacggtcaaacgcggtggccctttcgatgcgtgcgcggtgagaacgaaagtaagatgagtgggtgtttaggaagcggtatagtgcctcctggttgcggcgcagggtgggctggacttggggagattggagcatgctgttgggcaccccagtcagcaacttcatggtggggtttccgttcatgggacggtcgggccagtgcacaaaggcatgaaggaacatacagcaaaaaagtccacaggcggctgagcgtgggccctgcacgctctgggtggacttttccagggtgatgcagcggtctttggtagcaagggcactgcggcgcaggagcccctcgtactcaaactggtaaatctgtttgagtcgctcatccgagaacccaaaaggatcaaaaaggtagcaggtgttggagcgcgggttccaaccaaaagccagccagtgctctccccccgtctcgcgtccggcagtgttgactatggcgcaggcgagcttgtcgggggccatgaaccccgggaaacgcttgtcaaaggttcccaggaaatagggaccgcaacccaggtctcggacgatggctttgagctcttgctcgctggagccgtttccggacccgcatgacatggctgcagctgctgcttgcaagaagcaagaggcttcttatgtggtggcgttgccggccgagaacggtgtgcgcaggtagacggcctcgatgacgccgcggtgtggctggtgcactctgaccacgtcgaagacttcgaaaagaagataaagcagggtgggctcatccatgggatccacctcaaaagtcatgtccagtgcatgggccgagttggcatagagcaggttttgtcccaggtctgtaagggcccccatggacatgaagttgctggagaacggtatgcgccacatggtcctgtcgcacaggaactttttttgggtaacactcttaacggcagtagttccgatgagcgggtatggataattggctgggtaaggttccccttgtctcatagtaggcgcaaggtatcctacaaagccagagttgttgtgttgatatggtaaggtgacggctttgtagtcagtgtaattaacctcatcaaccacctgcctgctcataggctggaagtttctgaaaaaggagtacatgcgatccttgtatccctcagggatgtaaaagccctggtagccaatgttgtagttggcgagcatctgtaccaagaaccagtctttggtcatgttgcattgggctacgttgtagccttcgccatccacagtgcgctttatttcaaattcgttaggagatagtaacctgtcatttccaggccagctcactgaagagtcaaacatgatggaaaccttcttaaaagtgtgatttagatagaaggtaccatccaggtagggaatagaaccggaatagacaaagtatgggtcaaatccagaccccaaagagggagtttctttggttttcagtctggtaaatgaccagcctctgaaagccgcccagttgcgagaaggaatggaaatgggaatattggttgcgttggcaggtatggggtagagcatgttagctgcagataggtagtcgttgaatgactgatcattggtgtcattccgcagcatggcttcaagggtggaagcggtgttgtgagccatggggaaaaaagtagcataaagattgatgctcgtgaaactgatgctggcgccatctacccgtaggtcgttaccaagggaactctgtagaaccatgtttacatccttcctaaagttccactcataagtgtaggagcctgggagaagcagcaggtttttaacagcgaagaatttttgaggcacttgtatgtggaaaggcacataacgtccgttacccagaagcatggatcggtaacgcaagccagcgttacggtggtggttgaatgggttgacattgtccatggcatccagagaccacctggcaccaatgttcacataggtgtctactagagatggcggcaccacccgcccgttcatgtagtcgtaggtgtttttgttttctgggagagtgacattggacggggtgtatttatacgagtctgggagatacaaagccacattggaataaaggaaacttcgccatagattggcttggatgttgatttccatggcaaaaggattgcctccatggatttcattagcagtactaactgtggtgtcatctttgtcccactgtgttccactggttccagcaactgcatctgttttaactttaacaccttggtaagtgtctgtaaatcccacaccattcaacggaaagcaatagtttggcaattcgtcctccacaccatggttttcaataatacgcacatcaggatcatagctgtccaccgcctgattccacatactgaaataccgggttctgtcacccagagagtcaagcaagagctggtaggacagttcagtgtttctgtcttgcaagtcaaccacagcattcagctgagaggcctgaccggccagcacccccatattgccagtgctgttgtagtacatgagcccaataaaattgtctctgaagccaatgtagttgggtctgttaggcatggcttgctgacccaaattggattcagagctggtgtcctctgttccaggtttgtatacaatatgagtatctggagtctgcaagtcaacattttctgtgtacattacaatatctggatcgtagttagcagcaatatttttgttgtcaaagaaagccagatctatatcatagttaggagtggtggcggcggtttctgaatcttttaagttagcctgaccaccttctttgttggtaggcttggcgaaagaaccatagcagggtttcatctttgtagtgtccttcagagctctgcctccatatttttcctctgtaccattggcgtcaacccaactggcatttccaacttgtggttctggttggaaagttttatcagcataaattactgtgtcagttccagaagttgaatctattccaataggcagcccatcagcttctatctttttcccagtaacaccgggcatggcagctaccccaaaggtatgcattttgctgtcagaatccttccactggcaggtgttgggcgctcccttgggagccaggctgttgtaggcggtcccggagtagggtttgaagctagggccccggtccagcacgccgcggatgtcaaagaacgtgctggccatatccagtactctgttgtcccctacagccagcgtgtagcgaactttgtaagagtaggtattgtcttcccggtcaacgggcacgaagcgcagcattagtcgctggctacggtcggtggtcacatcgtgggtgggcgccactgtggggtttctaaacttgttccccatactgaagtaggtgtctgttgcacgggcgaactgcaccagacccggactcaggtactccgaagcatcctgtccggcgatgtgcatgtatgcccattggggcatcatcgatggggtggccatcttgaaagcaactcagcctcggcgcgcgacctcttcctttctcctctgctgcggcggcatggtgatgatacatacacacagacaagcaagttaagcgctactccatatttaattaatagcagcgacggcgctttacactctgcacgcccagacccacgatgctgttcagagtactctgccagtttgctttcgggcgcggtgtgccccaggacgcggtctggctacggcgacgggctgtacggcggtgggctttctggtagcgacaggtttgggaataggcgccgcagaagcagggggaggaggcaagtccaaggtggcaggccgatgcgactgagaaggtttcatcaccccggtagccatgtgagctacaggcctggtagtgggcattccgagctttactgcctcctcgtatgaagggggctcgtctgcgcgcgtcaccaacgtctgttccagctcgggacgcggtcgcttgtcgccccgcttctccagcggaggaagctcttcctccacttccatttcaccaggagttgcgggcggcgggtccaggcggctgtttatctgtttctgcacagcctggttggctagatccactacgccgttaataccagaggcgataccatcgaccaccttttgttggaagttctgctccttaagcttatttctaagggcctgccctgtgctgctgttccaagctttgttcccataggtttttatggtcgagccaaaatttttaagcccgctccagatactgctccaattgaaggcgcccccgttcagttggctcgtgccgatgtcgctccaggtgcccatgtacggcctcgtgccgtgtcgcggagccagggatgaaaaattgatgtcttccatctctacaaaaacatagtcacaggaccaggagcgtcagagtccattctattttttatttataaatttttccattgttagtggcgctgcgaggcctgaaccgccacggaagctatgcctggtatcgccccgatcgccgcggcgatgatgggtataagagctggcagaaagccaccccctaatcgcttgctgatagcgcgccttcgtctgtggcggcgcatccctcgccccaacatccttctacggcgcgagtttcttcctcggtagccagtaatggggacgcgaaggcggcaagtgagagccatatctgcaaggaggcagcgtcaacagtcattaagtggtgatgcttggatgatagcgcgcgcgcggcagcgtcagaggttcagcgcgaccatcgcggtacactctccgcaccagggcggcgggagttaatttgctggcagtggtgcggcggcggcgacggcgagtgcgacttgcaggtagtttgcggcggcgtgaggtgttgctccgacttcgatagtagcgagtgcctctgtaacccggagtgggaatgatggatgggtgcagagcatagttgggcattagcagacttgctgggccatactttcgacgtgatcttctagtggtgctgggggcggcaacgggcgcgggcatccagggttccgtctgaacctcaattgaggtgactgtgggttttgcaggttcggtctgcacttccatggactcagtgggaatcttgatgtcaaaggtttgtactcccaaacctggcgccacttccttgatgggtctcactttcacctcaggctggatatcggcatccactttcattttctccagtacgtcttctaatctctgccgcttgggcaccattagctgcatggtgggatataggtcctcaccctcgcgctttacgcctctgctcgcaggtacgggcagcacttgctgcagggtgactggtttgaggctaggggtgggatttccatgatccaagggaatagataccgcctcctctttgggactggatcttgtgcgcttgccataagcaaactcgccaaggcggtctgccgcctgctcaataatatcgtcatccccatacacctcatcataggaccgtttaaaagtagtgctggaacgctcgccaggtgtaaagaccacagtggtcccgggtctaagcacttggcgtacttttcgaccgcgccactgcacgcgccgtcttggcgcgaactcgcgcacaaactccaccagtccatcatcgccatcttcttcttttttgtcctttttaacccgcttgattttgcggggctttttttcatccttcatcggcggaccgtagatttcaggcgcgatgacctggagcatctcttccttgtatttgcgcttggacatacttgccgctgggacacaacatcggagactgctcagtatcttctaagtgcgaggggggcgggtgcgcacgggcacgcgctggccggtagtggcatcgcgcacccaatacacattgcctcttcgcggttgggccatgttggcaatggccgctgctgccgccgtggccgcgcgcctgcgggacctgccgctgctagcaccagaagccgcgcgtctggccgctctaagcatggctcttcgtcccacacgtttggccctccgcagaatagcttttgcagctcgcatagcgggagtagccctgtggcgcctggcgatgcgcctccttcggctcttccggcgagcataggcgcgagcgtctgccactacactgtcaataactgcatccacagtagatgtaggcgcagtaggagtataattacgagcatcggcaaccacctggtcgatcacatcatcgaccgtggtccgagtgcgggtacggcccttgagggcgccccagggagcgcggaaatgaccgcgaacgcgcacggggtgctgggtagagcgtttgcgggcgcctccgtacatcttggtgggcgcatgcagtccccaaccggtattattactgggcgagatgagaatggacatttttttttttttttagaaagtgcggcttgaaagaacgcgcggcgcgactatgcccagggccttgtaaacgtagggacaggtgcgacgtctggcgtcagtaacggtcacgcgctggactccccggatactgctgcgtaacggcagggtcccgtgatctgtgagagcaggaacgttttcactgatggtggtaattgtgggcgccggcgggcggatgaggatctggttctcagggaagcggttgaagacgtgcgtgagcgaggtggactgtcggagctgctgagagtacacggcttgctcattgtagaaactctttgagaagaccggcataagctctgcacccactactgggtagttgttgacttgtctcgaggagcggaaggtgatggggtcttgcatcatgtcggggagcgaccagtagacctgctcggctccacaggtgacatccgaagtggtgagcagtgtccaggaccttattcctttctcagggttaccataattgtaggacaggtaccagctgcggtaggctgtgttgattttgtcttccaagacattgtagcttctattcttgctgtctttttctaaaggttggatctttaactcttttttaacttcagacataagtaatagttctgcagctgcagcttcacgtttttgtttttcagttatataagtatctcctctagttatattatcatcttcactggtttcctctgcaacagccactgtggttgttttaaccaccgccttttcgcctgtttcagtagtggtatcctttttgctttcctcataggcagtgacatccaaaagggcaggaatattacccccttcaagatcttcatacatgattttgaaaccctcctggaatggatgtctcttcctgatgccaagcaagttgctaagtcggctttcagtaaaatctaccccgcaaccaggcaacaaaacaatgtcaggatggaatgcctcataagtgtagacccctggcataatcaacttagtttcggggtcccacccgagcctgaagtttctagtgtcaaacttaacaccaatgtcactttccagcactccattctgtctgccaattttcaggtagttgtcaatgatggcattgttcatcaggtcgatggtcatggtagctgagaagttaccttctggtaaagtgaactcaaaccactcatatttcaaaatatcatctttatgatcatttactgtaacaccttcaggagccttcctagataccatcaccctcgccttaaacttgttgctgaacatgtactcgttcacgttgggcatgttggtgtgcataatggtcttcagctgaccgccccaccgcgaccgctcgtcaaagttaatggtctgggtgctagcctccgtgggggtaaagtcattgttctgcaccactgtggtcaggaagttgctgtggtcgttctgatagttcagggaggcgatgtccgccgacttgttgtccaccagatacaacttggtggtatcgtactggggtgacagctccgagtaacgaatgctatttctcccttccgtaggcgccaggtaccgagggggtacgaagggagcctccagtgggggctgtatcatcgccgcctgttgctgcatcacgctctcgtaagaaggaggaggaccctccggatacaccaccgctccgcctagcacggctcgtctcctcatcgtactagatacagataacaaaaaaaagaacgaacgcacgctcggttgccatggccttggtgagttgcctttttatttttactttcacttttacaacatgcgaccgaaacggggacgcagatgagcgaacgggttgccaactccttttccacccaagtccaacacgctgctgtcatcggcagagtcctcgtcgtcccacacaagacccatctgcctgtcgtggcgctggcgtctacggctcggtctgcttgtagcccccaagatcctgggctcgtctctgtgatcctgcgcataggtcttccatctactcatcttatccaccaggctctctattccattgttagggaagttcttttccctctctggcctcagcaaagagtcattcaagtactcatcctcgcccatcaagcgcgggcggtttattctccccagttcactgctgcgaacgctgtttagtgaaaaggacaagctagggaaaggactcgcagcttcgggcacggccgcggcagcaccagccgttccgggcaacgatacggaagagtgccttctatcgcccccttccttcttccaaaccgtataacctggcggcggggaaaatatgctactgtccacatcgtcccataggaacccgtcattgggatcgggcatgtcgtattcgccagtgtagaaaccaggtgggggcagccagtgtgggttcagaatagcattggtgaaataatcagagttcatggcggccgccctgtgcaggtagtccagcagtttgttaatgaaaggcctgttactagcatacatgctgggctccatgtttcgagctgtcatatccagcgcggcggtaggtgtcgccccctcctgcatcaaaaacagtccaacgctctgttgcacgtatcttaggatccgctcctcctcagcggtaagcgcatactgaggagggatcttctgcgaccggttggttagtaagaagttcagggtggcttccaaaccgcctgtgtcttcctgacccagggcgcggctcacttgggtgatttcttgataggtctgctcgtccacctggctctgtcctatagcctcgcgatacaggttaagcaggtagcccaagtaggagttgcggtcgatgctaccgctgtcagtgaagggggataccagcagcagcagcaggcgggagttgggagtcagcaagctagacacggtcgcgcgatctcctactggggcgtgcactccccacagacccttcaggttcttgaaagcctgggtcaggttcactgtctgcaagccctgtctgctggtctggaagaagtaatctggcccggactggtacacctcgctctggggcacctcagataccatgagtctcaatgcactcaaaaagtttgtatagtcttgctgaccacggggcacgttggcgggctgggtgctaaggaaagcgtttagcgctaccaatgaccccaagttggcgtcgcgctggaaccgctcgcgctgagacacagcctcgcgcacatcggtcaccatccggtccaggttggtctgcacgttgctgctgttgtaacgggccacgcgctccaaaagagcattgtataccagcccggcctcatcgggacggatggccttgttctccaccagcgcgttcacgatagccaggaccttctcgtgggtggggttggagcgggagggcactacggcctccagtatggccgaaaggcggttggcctggggttgctgtctaaaggcttcggggttgcgggtcgtcagcgccattatacgttgcatggcctgggtccaatcgtccgaggagttaatgccggacggctggctctgtagcgccgcccgcattgcggggtccggtgcctgctgttgttccatctagcaaaaatacgggtcgcgccatcagtcttccaagtactcgccctcctcgtcctcgacttcatccacctcttctatgtaaggaagctcacaccctgcagcctccatggccctgcgactgggttgccattgcaagtccgctcccatgtcaaagtagttctccccatcagttccggcccccgttagagccctttgcaagctgtgcataagttctctgtcgctcagctcgcgcctcctgctggcgctcaccgcgcggtgcatcctgtcattgcgatacacccccagatcgtcgcttaaagtcaacaccttgagagtcatgcgcatgtaaaacccatctatcttcacctccttgtcaatgggtacgtagggggtcttgtagatcttgcgagcgtagtatttgcccaggctcaagaccgagtagttgatagctgccactttctcagccaaacccaggctacgttcctgcactataatactttgcaggatgttaatcagatcatacagccatctcccatcaggctcggtgatattcaacaacgcctccctgaatgcctcgttgtccctgctatgttgaaccaccagaaacagctgagctgtcaggggtttgctagtggggttctgggtgatagcctccatcaggtcccacaggtgcatcagacccagggtcacttcctcgcgggcgatcagggtgcgcacatggttgttaaaagatttttggaagttgcgctcctccttcacggtctgctcgtaggccgagactaggttggccgcggccacatgtgccctagctgggctgatccctgtcacttcatcgacctcaaaatcctcgtcttgcagcacccgtcttcgatccagaccgtggcgcagctcgcgacccgcgttaaatcgagatgctcgcatctcctctggctcctcgccgctcctgtccctgaataggttctgttggggcacgtacgcctcgcgagagtccttttttagttgcacccgcgggtgccgctcgggcgatggagcccccaggcgcgccaatccctcgccctcttccaagtccagatcataggcgggctgtcccgcgccgctgacggctgcagccgcagtagttacaggagcaggaagagccttttgtggctgttgttgtagctgctgctgagaagggggctgttgctgggggcgcatctgtcgcagcacgggatgcatctgggcaacaaaaaacaaaaaaaagagggctcgctcccgtaaactggagaagtcggctggcggggtcttagaaatgacgaggctgccaaaccctcgcttgtcgcggaaaccggccgatccggcgcgctaagactcgaaccggggcacaccgcaacgcaaccctggcgattgattctccagactacgggcgcgagccactcccagccccgagaactgagtgttctaaagcttgacgcagcactggctcccatccaggaaaaagcaaaaaaaaaacgacccgcctccgtatcctggaggttttgtgcaggcctgggtcgagacgggagtgccagtaccacgttagctgcggctccagcctgatccgagattcgaaccggggtacacgcgcagcccaacccgttcgcttagcctccaggccacggagacgagccgctgaccgctttcgtttttgcccgtatgtctagagcatcaacgactgtgcgcgtctcacgggccaaaccgtgcctaccatgaactacttcatgccgctgcgcaacatctggaaccgcgtacgcgagttcccgcgggcatccaccaccgcctccggtatcacctggatgtccaggtacatctacggttatcaccgcctcatgctggaagacctcgcccctggcgccccggctacagagcgatggcccctataccgccagccgccgcctcactttctcatcggctaccagtacctggtgcgcacctgtaacgattacatctttgacacccgcgcctactcgcgcctcaagtacaccgagattgtgcgtccggggcaccagacagtcaactggtcagtcatggccaactgctcctacacaatcaacaccggggcttaccaccgcttcgtggactttgacgacttccaagccaccctcacccaggtgcagcaagccatcctcgcagaaagggttgtagcggacctggcacttgtccagcccatgcgcgggttcgggatcactcgcatgcatggcagagcgggcgaagaagaagtgcccgtggaacgactcatgcaagactactataaagatctggccagatgtcaggataatgcttggggaatggcccatcgcctgcgcatccaacaagccggacccaaagacctggtgctcctcgccaccatccgccgtctcaaaactgcctattttaatttcatcaccagcagcatcgtctcaccctccaaagaggaggaaggagaagaaagagagaaccccgaccgagcgtctagccgcccccgcccgcaagaaacagtgctcagcctaccttgcgattgcgactggttagacgctttcgtcgaaaggttttcagatcccgtggatcttgagacgatcaggtccttgcgcggagtacctacggggcaattgataaaatgcataatcagcgcggtgtccctgcccaacggagagcctcccagtcaccacttcagggagatgcgcggaggcgtcttcactctgagacccagggagaacggtcgtgccgtcaccgagaccatgcgccgccgccgcggagaggtcattgaaagattcatcgaccgtctgcctgtgcgccgccggcgtcgccgcgttccccctcctcctgcagccccacctgaagaggaagagatgttagtggaagaagaagaaattgaggaagaaatcccgggggctttcgagcgcgaggtgcgcaccaccatcgccgaactcatccgtcttctggaagaggagttgaccgtgtccgcgcgtaactcccagtttttcaactttgccgtggacttctacgaggccatggagcgcttggaagcgctgggcgatgttagcgagatgccgctgagacgatggatcatgtatttcttcgtcaccgagcacatcgccaccacactcaactaccttttccagcgcctatgcaactatgcggtcttcacccgccacgtggagctcaacctcgcccaggtggtcatgcgcgcgagagatcccgagggggctgtggtctacagccgcgtctggaacgaggcgggcatgaatgcattctctcaactcattggacgcatctccaacgaccttgcggccaccgtcgagagagcgggccgcggagatcttcaagaggaagagatcgagcagttcatggccgagatcgcctaccaggacaactctggcgacgtgcaagaaatccttaggcaagccgccgtcaacgataccgagattgattctgttgaactctctttcaggttcaagctcacggggccggtagcgttcacccagaggcgtcagatccaggatgtcaaccgccgcgtcgtcgcgcatgcaagtcttctcagggcgcagtaccagaacctacccgcgcgcggcgccgacgtaccactgccggccatgccgccgggtcccgagccgcccctgccgcccggtgcgcgccctcgacaccgcttctaaacatgcaagaagcaacagagccaccgccgcccaaacggaaaaacaagggcacggtggtagcgcccaaggggcacggaaccctgcaagccatcgacatctccaccaacggacccgtggagatcaagtaccatctgaacctccctcacgccctcgaaaagatcatgcaagtcaatctcctgacactgcctactaacctgactccgcagcgtctcaggaccctggacagctccgacctgcgcgctctcgtcctcgagctccgcccctgccgcgccgaggtctggacttgcctcccgcgagggctcgtcagcatgaccaccatcgagacagaagatggtcatgccgatgcagacaacatagtagagcgcgaggtacaagcgccaggcctcaattttccactgaaatttctcgtcaaaggaagtcaggtacaactcattcatgaggtgcatcccgtgaatcgatgcgagtactgcggccgtctgtacaagcacaagcatgaatgctcggcgcgtcgcagggagttctacttccatcacatcaacagccattcctccaactggtggcaggagatccagttcttcccgattggctctcatcctcgcacagaaaggctcttcctcacctacgatgtggaaacctacacctggatggggtcctttggcaagcagctaatccccttcatgctggtcatgaaactctctggagaccagcggctcgtcaacatcgcctatgacctggctataaaactcaagtgggatcgctggcagcaggacccccaaaccttctattgcgtcaccccagaaaagatggcagtcgggcagcattttcgtcagtaccgggaccagttacaaacagcactggcagtggacctctggtcctccttcctcaaagcgaaccctcacctgcacgaatgggccctcgaacactatgctctcactgaccctacagacctcacttttgaagaactcaagaagctgcctcatgtcaggggcacacctcgattcttagaactgtacatagtggggcacaacatcaatggctttgatgagatcgtcttggccgctcaggttatcaataaccgagcagaggtccctcagcctttcagaatcacccgaaattttatgcccagggccggcaagatcctcttcaatgatgttactttcgctttgcccaaccccgcctacaagaagcgggtggacttccaactctgggaacagggggcctgtgatgacatcgacttcaagtatcaattcctcaaagtcatggtcagggacacttttgccctcactcatacctcgctgcgcaatgcagcccaagcatactctctcccagtggagaagggatgctgtccctacaaggcagtcaatcaattctacatgttgggctcttaccgtgcagaaaaagacgggtttcccctcgaagagtactggaaggatcgcgaagaataccttctcaaccgcgagctgtgggaaaagaaaaaccaaccgcgttatgacatcatccaggaaactctcgactactgtgccctagacgtacttgtcaccgccgagctggtagccaagctgcaagagtcatatgcccacttcataagggactctgtaggcctccctcatgcccattttaacatattccagagacctactatctcttccaattcccatgccatctttcgccagatcgtttacagggcggaaaaacccaaccgcaccaatctgggcccgggtcttctcgccccctcacatgaactctatgactatgtgcgagcaagcatcagaggggggcgctgttatcccacttacatcggcatcctcgaagagcccctctatgtctacgatatctgtggcatgtatgcctccgcgctcacccaccccatgccctggggcacccctcttaacccctatgagcgcgcgctggcagttcgagaatggcagatgactttggatgatcccgccaccatcagctattttgacaaggatttgctaccgggaatatttaccatagatgcggacccccctgatgagttcatgctagaccccctcccccctttctgttcaagaaaaggaggtcgactctgctggaccaatgagcccctccgaggcgaggtagccaccagtgtggatctgataaccctgcacaataggggatggcgagtcagaatagttccggatgaactgacaaccatcttccctgaatggaaatgtgtggcgcgcgagtacgtccagcttaacatcgccgccaaggagcgcgcggacaaggaaaagaaccaaaccatgcgctctatcgccaagcttctatccaatgccctctatggatcatttgccaccaagctggacaacaagaagattgtgttttctgaccagatggacgagagtcttatgaaaggcatctctgctggtactgtcaatatcaaatcctcctcgttcctagaaactgacaacctgagtgcagaggtcatgcccgccttcgagagggaatacctaccccaacagctggcgctcctggacagcgatccggaagacagtgaagacgaacagaggcccgcccccttttatacccccccggcggggacccctggtcacgtggcctacacttacaagccaatcacattcttggatgtggaggagggggacatgtgtttacataccgtagagaaggtggaccccctggttgacaacgaccgctacccctcccacgtggcctcctttgtgctggcctggacacgcgcttttgtatcagagtgggctgggttcctctacgaagaggaccgcggcactccgctcgaggacaggcccataaagtcagtctacggggacacggacagcctctttgttacccagcggggacacgaactcatggaaaccaaaggtaagaaacgcatcaaaaaacatggcggaaaacttgtttttgaccccgatgagccggatctgacatggctcgtggagtgcgaaaccgtctgcgcctcctgcggtgcggatgcatactcccccgaatccattttcctcgcgcccaagctgtatgccctcaaatgtatctactgccccgcctgccataaaacttccaaaggtaagctccgtgccaaaggccacgcggccgaggcgctcaactacgaactcatggtaaactgctacctggccgacatgcagggcgccgatcggcagcggttctcgaccagcaggatgagtctgaagcgcaccctcgcaagcgcccaaccaggcgcgcaccccttcaccgtgacggaaacaaccctgactcggacgctgcgaccatggaaggatcggaccctggcagcgctggacgcccatcgtctgattccctactccaggagccgtcccaacccgcgaaacgaggaggtctgctggatcgagatgccatagagcacatcaccgagctctgggaccggctcgagctcttgcaacagactctttccaaaatgcccatggctgacgggctgaagccgctgaaaaacttctcctcgctccaggagcttctatcccttgggggagagcgcctcctaacggacttggtgcgggaaaatatccatgtaagggaaatgatgaacgaagtggcccccctgctccgggaggacggcagctgtcgctccctaaactaccatctgcaacccgtaattggggtcatttacggtcccactgggtgcggcaagtctcagctgcttaggaatttgctctcatcccagttaatcaccccggctccagaaacagtattttttatagccccgcaggtggatatgatccccccctctgaactgaaagcctgggaaatgcaaatatgtgagggaaactatgctcccgggccagagggaactttcatcccccaatctggcacccttcgcccaaagtttattaaaatggcttatgatgacctgactcaggagcataactatgatgtttcagacccccggaacgtgttcgcccgtgccgctgcccacggccccatcgctatcattatggatgagtgcatggagaatctggggggtcacaaaggcgtctccaaattttttcatgcttttccctctaagctgcatgataaatttcccaagtgcaccggatacactgtcttggtggttctgcacaatatgaaccccagacgggatctaggcggcaacattgccaacctcaagatccagtccaaaatgcatataatttcaccccggatgcacccgtcccagctcaacagatttgtaaacacctacactaagggcctccccgttgcaattagtctgctcctaaaagatattgtgcaacaccatgcactccgaccttgctatgactgggtgatttataacactaccccggagcaagaggctcttcaatggagctatctccacccccgggacggactaatgcccatgtatctaaacattcaatcccacctttacagggtactggaaaagatccaccgagttctcaatgatcgagaccgatggtccagggcataccgcgcgcgaaaa

SEQ ID NO: 78 - DNA, 4157 bp, Unknown
  Description of Unknown: Human adenovirus 16 sequence
tataaaacgcctggtgatcagaggccgaggtatccagctcaacgacgagtcggttagctcttcgcttggtctgcgaccagacggagtcttccagatcgccggctgtgggagatcttccttcactcctcgtcaggctgtgctgactttggagagttcgtcctcgcagccccgctcgggcggcatcggaactctccagtttgtggaggagtttactccctctgtctacttcaaccccttctccggctctcctggccagtacccggacgagttcataccgaacttcgacgcaatcagcgagtcagtggatggctatgattgatgtctaatggtggcgcggctgagctagctcgactgcgacacctagaccactgccgccgctttcgctgtttcgcccgggaactcaccgagttcatctacttcgaactctccgaggagcaccctcagggtccggcccacggagtgcggattaccatcgaagggggaatagactctcgcctgcatcgcatcttctcccagcggcccgtgctgattgagcgcgaccagggaaatacaaccatctccatctactgcatttgtaaccaccccggattgcatgaaagcctttgctgtcttgtttgtgctgagtttaataaaaactgagttaagaccctcctacggactaccgcttcttcaatcaggactttacaacaccaaccagatcttccagaagacccagacccttcctcctctgatccaggactctaactctaccttaccagcaccctccactactaaccttcccgaaactaacaagcttggatctcatctgcaacaccgcctttcacgaagccttctttctgccaatactaccactcccaaaaccggaggtgagctccgcggtcttcctactgacgacccctgggtggtagcgggttttgtaacgttaggagtagttgcgggtgggcttgtgctaatcctttgctacctatacacaccttgctgtgcatatttagtcatattgtgctgttggtttaagaaatgggggccatactagtcgtgcttgctttactttcgcttttgggtctgggctctgctaatctcaatcctcttgatcacgatccatgtctagacttcgacccagaaaactgcacacttacttttgcacccgacacaagccgtctctgtggagttcttattaagtgcggatgggactgcaggtccgttgaaattacacataataacaaaacatggaacaataccttatccaccacatgggagccaggagttcccgagtggtatactgtctctgtccgaggtcctgacggttccattcgcattagtaacaacactttcattttttctgaaatgtgcgatctggccatgtttatgagcaaacagtatgacctatggcctcctagcaaagagaacattgtggcattttccattgcttattgcttggtaacatgcatcatcactgctatcatttgtgtgtgcatacacttgcttatagttattcgccctagacaaagcaatgaggaaaaagagaaaatgccttaacctttttcctcataccttttctttacagcatggcttctgttacagctctaattattgccagcattgtcactgtcgctcacgggcaaacaattgtccatattaccttaggacataatcacactcttgtagggcccccaattacttcagaggttatttggaccaaacttggaagtgttgattattttgatataatttgcaacaaaactaaaccaatatttgtaatctgcaacagacaaaatctcacgttaattaatgtcagcaaaatttataacggttactattatggttatgatagatccagtagtcaatataaaaattacttagttcgcataactcaacccaaatcaacagtgccaactatgacaataattaaaatggctaataaagcattagaaaattttacattaccaacaacgcccaatgaaaaaaacattccaaattcaatgattgcaattattgcggcggtggcattgggaatggcactaataataatatgcatgttcctatatgcttgttgctataaaaagtttaaacataaacaggatccactactaaattttaacatttaattttttatacagatgatttccactacaatttttatcattactagccttgcagctgtaacttatggccgttcacacctaactgtacctgttggctcaacatgtacactacaaggaccccaagaaggccatgtcacttggtggagaatatatgataatggagggttcgctagaccatgtgatcagcctggtacaaaattttcatgcaacggaagagacttgaccattattaacataacattaaatgagcaaggcttctattatggaaccaactataaaaatagtttagattacaacattattgtagtgccagccaccacttctgctccccgcaaatccactttctctagcagcagtgccaaagcaagcacaattcctaaaacagcttctgctatgttaaagcttcgaaaaatcgctttaagtaattccacagccgctcccaatacaattcctaaatcaacaattggcatcattactgccgtggtagtgggattaataattatatttttgtgcataatgtactacgcctgctgctatagaaaacatgaacaaaaaggtgatgcattactaaattttgatatttaattttttatagaattatgatattgtttcaatcaaataccactaacactatcaatgtgcagactactttaaatcatgacatggaaaaccacactacctcctatgcatacacaaacattcagcctaaatacgctatgcaactaagaaatcaccatactaattgtaattggaattcttatactatctgttattctttattttatattctgccgtcaaatacccaatgttcatagaaattctaaaagacgacccatctattctcctatgattagtcgtccccatatggctctgaatgaaatctaagatctttttttttctcttacagtatggtgaacatcaatcatgattcctagaaatttcttcttcaccatactcatctgtgctttcaatgtctgtgctactttcacagcagtagccactgcaagcccagactgtataggaccatttgcttcctatgcactttttgccttcgttacttgcatctgcgtgtgtagcatagtctgcctggttattaattttttccaactggtagactggatctttgtgcgaattgcctacctacgtcaccatcccgaataccgcaatcaaaatgttgcggcactttttaggcttatttaaaaccatgcaggctatgctgccagtcattttaattctgctcctaccctgcattgccctagcttccaccgccactcgcgctacacctgaacaacttagaaaatgcaaatttcaacaaccatggtcatttcttgattgctaccatgaaaaatctgattttcccacatactggatagtgattgttggaataattaacatactttcatgtacctttttctcaatcacaatataccccacatttaattttgggtggaattctcccaatgcactgggttacccacaagaaccacatgaacatatcccactacaacacatacaacaaccactagcactggtagagtatgaaaatgagccacaaccttcactgcctcctgccattagttacttcaacctaaccggcggagatgactgaaatactcaccacctccaattccgccgaggatctgcttgatatggacggccgcgcctcagaacagcgactcgcccaactacgcatacgccagcagcaggaacgtgccgccaaggagctcagggatgctattgaaattcaccaatgcaaaaaaggcatattttgtttggtaaaacaagccaagatatcctacgagattaccaatactgaccatcgcctctcatacgagctcggaccgcagcgacaaaaattcacttgtatggtgggaatcaaccccataatcatcacccagcaagctggagataccaagggttgcatccactgttcctgcagttccgccgagtgcatctacaccctgctgaagaccctctgcggccttcgagacctcctacccatgaactaatcaacccagcccctcacttaccaattacataaagccaattaataaa

SEQ ID NO: 79 - DNA, 1062 bp, Unknown
  Description of Unknown: Human adenovirus 16 sequence
atggccaaacgagctcggctaagcagctccttcaatccggtctacccctatgaagatgaaagcagctcacaacacccctttataaaccctggtttcatttcctcaaatggttttgcacaaagcccagatggagttctaactcttaaatgtgttaatccactcactaccgccagcggacccctccaacttaaagttggaagcagtcttacagtagatactatcgatgggtctttggaggaaaatataactgccgcagcgccactcactaaaactaaccactccataggtttattaataggatctggcttgcaaacaaaggatgataaactttgtttatcgctgggagatgggttggtaacaaaggatgataaactatgtttatcgctgggagatgggttaataacaaaaaatgatgtactatgtgccaaactaggacatggccttgtgtttgactcttccaatgctatcaccatagaaaacaacaccttgtggacaggcgcaaaaccaagcgccaactgtgtaattaaagagggagaagattccccagactgtaagctcactttagttctagtgaagaatggaggactgataaatggatacataacattaatgggagcctcagaatatactaacaccttgtttaaaaacaatcaagttacaatcgatgtaaacctcgcatttgataatactggccaaattattacttacctatcatcccttaaaagtaacctgaactttaaagacaaccaaaacatggctactggaaccataaccagtgccaaaggcttcatgcccagcaccaccgcctatccatttataacatacgccactgagaccctaaatgaagattacatttatggagagtgttactacaaatctaccaatggaactctctttccactaaaagttactgtcacactaaacagacgtatgttagcttctggaatggcctatgctatgaatttttcatggtctctaaatgcagaggaagccccggaaactaccgaagtcactctcattacctcccccttctttttttcttatatcagagaagatgactga

SEQ ID NO: 80 - DNA, 126 bp, Unknown
  Description of Unknown: Human adenovirus 16 sequence
atggccaaacgagctcggctaagcagctccttcaatccggtctacccctatgaagatgaaagcagctcacaacacccctttataaaccctggtttcatttcctcaaatggttttgcacaaagccca

SEQ ID NO: 81 - DNA, 360 bp, Unknown
  Description of Unknown: Human adenovirus 16 sequence
gatggagttctaactcttaaatgtgttaatccactcactaccgccagcggacccctccaacttaaagttggaagcagtcttacagtagatactatcgatgggtctttggaggaaaatataactgccgcagcgccactcactaaaactaaccactccataggtttattaataggatctggcttgcaaacaaaggatgataaactttgtttatcgctgggagatgggttggtaacaaaggatgataaactatgtttatcgctgggagatgggttaataacaaaaaatgatgtactatgtgccaaactaggacatggccttgtgtttgactcttccaatgctatcaccatagaaaacaacacc

SEQ ID NO: 82 - DNA, 573 bp, Unknown
  Description of Unknown: Human adenovirus 16 sequence
ttgtggacaggcgcaaaaccaagcgccaactgtgtaattaaagagggagaagattccccagactgtaagctcactttagttctagtgaagaatggaggactgataaatggatacataacattaatgggagcctcagaatatactaacaccttgtttaaaaacaatcaagttacaatcgatgtaaacctcgcatttgataatactggccaaattattacttacctatcatcccttaaaagtaacctgaactttaaagacaaccaaaacatggctactggaaccataaccagtgccaaaggcttcatgcccagcaccaccgcctatccatttataacatacgccactgagaccctaaatgaagattacatttatggagagtgttactacaaatctaccaatggaactctctttccactaaaagttactgtcacactaaacagacgtatgttagcttctggaatggcctatgctatgaatttttcatggtctctaaatgcagaggaagccccggaaactaccgaagtcactctcattacctcccccttctttttttcttatatcagagaagatgac

SEQ ID NO: 83 - DNA, 3633 bp, Unknown
  Description of Unknown: Human adenovirus 16 sequence
atgaggagacgagccgtgctaggcggagcggtggtgtatccggagggtcctcctccttcttacgagagcgtgatgcagcaacaggcggcgatgatacagcccccactggaggctcccttcgtaccccctcggtacctggcgcctacggaagggagaaatagcattcgttactcggagctgtcaccccagtacgataccaccaagttgtatctggtggacaacaagtcggcggacatcgcctccctgaactatcagaacgaccacagcaacttcctgaccacagtggtgcagaacaatgactttacccccacggaggctagcacccagaccattaactttgacgagcggtcgcggtggggcggtcagctgaagaccattatgcacaccaacatgcccaacgtgaacgagtacatgttcagcaacaagtttaaggcgagggtgatggtatctaggaaggctcctgaaggtgttacagtaaatgatcataaagatgatattttgaaatatgagtggtttgagttcactttaccagaaggtaacttctcagctaccatgaccatcgacctgatgaacaatgccatcattgacaactacctgaaaattggcagacagaatggagtgctggaaagtgacattggtgttaagtttgacactagaaacttcaggctcgggtgggaccccgaaactaagttgattatgccaggggtctacacttatgaggcattccatcctgacattgttttgttgcctggttgcggggtagattttactgaaagccgacttagcaacttgcttggcatcaggaagagacatccattccaggagggtttcaaaatcatgtatgaagatcttgaagggggtaatattcctgcccttttggatgtcactgcctatgaggaaagcaaaaaggataccactactgaaacaggcgaaaaggcggtggttaaaacaaccacagtggctgttgcagaggaaaccagtgaagatgataatataactagaggagatacttatataactgaaaaacaaaaacgtgaagctgcagctgcagaactattacttatgtctgaagttaaaaaagagttaaagatccaacctttagaaaaagacagcaagaatagaagctacaatgtcttggaagacaaaatcaacacagcctaccgcagctggtacctgtcctacaattatggtaaccctgagaaaggaataaggtcctggacactgctcaccacttcggatgtcacctgtggagccgagcaggtctactggtcgctccccgacatgatgcaagaccccatcaccttccgctcctcgagacaagtcaacaactacccagtagtgggtgcagagcttatgccggtcttctcaaagagtttctacaatgagcaagccgtgtactctcagcagctccgacagtccacctcgctcacgcacgtcttcaaccgcttccctgagaaccagatcctcatccgcccgccggcgcccacaattaccaccatcagtgaaaacgttcctgctctcacagatcacgggaccctgccgttacgcagcagtatccggggagtccagcgcgtgaccgttactgacgccagacgtcgcacctgtccctacgtttacaaggccctgggcatagtcgcgccgcgcgttctttcaagccgcactttctaaaaaaaaaaaaaaatgtccattctcatctcgcccagtaataataccggttggggactgcatgcgcccaccaagatgtacggaggcgcccgcaaacgctctacccagcaccccgtgcgcgttcgcggtcatttccgcgctccctggggcgccctcaagggccgtacccgcactcggaccacggtcgatgatgtgatcgaccaggtggttgccgatgctcgtaattatactcctactgcgcctacatctactgtggatgcagttattgacagtgtagtggcagacgctcgcgcctatgctcgccggaagagccgaaggaggcgcatcgccaggcgccacagggctactcccgctatgcgagctgcaaaagctattctgcggagggccaaacgtgtgggacgaagagccatgcttagagcggccagacgcgcggcttctggtgctagcagcggcaggtcccgcaggcgcgcggccacggcggcagcagcggccattgccaacatggcccaaccgcgaagaggcaatgtgtattgggtgcgcgatgccactaccggccagcgcgtgcccgtgcgcacccgcccccctcgcacttagaagatactgagcagtctccgatgttgtgtcccagcggcaagtatgtccaagcgcaaatacaaggaagagatgctccaggtcatcgcgcctgaaatctacggtccgccgatgaaggatgaaaaaaagccccgcaaaatcaagcgggttaaaaaggacaaaaaagaagaagatggcgatgatggactggtggagtttgtgcgcgagttcgcgccaagacggcgcgtgcagtggcgcggtcgaaaagtacgccaagtgcttagacccgggaccactgtggtctttacacctggcgagcgttccagcactacttttaaacggtcctatgatgaggtgtatggggatgacgatattattgagcaggcggcagaccgccttggcgagtttgcttatggcaagcgcacaagatccagtcccaaagaggaggcggtatctattcccttggatcatggaaatcccacccctagcctcaaaccagtcaccctgcagcaagtgctgcccgtacctgcgagcagaggcgtaaagcgcgagggtgaggacctatatcccaccatgcagctaatggtgcccaagcggcagagattagaagacgtactggagaaaatgaaagtggatgccgatatccagcctgaggtgaaagtgagacccatcaaggaagtggcgccaggtttgggagtacaaacctttgacatcaagattcccactgagtccatggaagtgcagaccgaacctgcaaaacccacagtcacctcaattgaggttcagacggaaccctggatgcccgcgcccgttgccgcccccagcaccactagaagatcacgtcgaaagtatggcccagcaagtctgctaatgcccaactatgctctgcacccatccatcattcccactccgggttacagaggcactcgctactatcgaagtcggagcaacacctcacgccgccgcaaactacctgcaagtcgcactcgccgtcgccgccgccgcaccactgccagcaaattaactcccgccgccctggtgcggagagtgtaccgcgatggtcgcgctgaacctctgacgctgccgcgcgcgcgctatcatccaagcatcaccacttaatgactgttgacgctgcctccttgcagatatggctctcacttgccgccttcgcgtccccattactggctaccgaggaagaaactcgcgccgtagaaggatgttggggcgagggatgcgccgccacagacgaaggcgcgctatcagcaagcgattagggggtggctttctgccagctcttatacccatcatcgccgcggcgatcggggcgataccaggcatagcttccgtggcggttcaggcctcgcagcgccactaacaatggaaaaatttataaataaa

SEQ ID NO: 84 - DNA, 2823 bp, Unknown
  Description of Unknown: Human adenovirus 16 sequence
atggccaccccatcgatgatgccccaatgggcatacatgcacatcgccggacaggatgcttcggagtacctgagtccgggtctggtgcagttcgcccgtgcaacagacacctacttcagtatggggaacaagtttagaaaccccacagtggcgcccacccacgatgtgaccaccgaccgtagccagcgactaatgctgcgcttcgtgcccgttgaccgggaagacaatacctactcttacaaagttcgctacacgctggctgtaggggacaacagagtactggatatggccagcacgttctttgacatccgcggcgtgctggaccggggccctagcttcaaaccctactccgggaccgcctacaacagcctggctcccaagggagcgcccaacacctgccagtggaaggattctgacagcaaaatgcatacctttggggtagctgccatgcccggtgttactgggaaaaagatagaagctgatgggctgcctattggaatagattcaacttctggaactgacacagtaatttatgctgataaaactttccaaccagaaccacaagttggaaatgccagttgggttgacgccaatggtacagaggaaaaatatggaggcagagctctgaaggacactacaaagatgaaaccctgctatggttctttcgccaagcctaccaacaaagaaggtggtcaggctaacttaaaagattcagaaaccgccgccaccactcctaactatgatatagatctggctttctttgacaacaaaaatattgctgctaactacgatccagatattgtaatgtacacagaaaatgttgacttgcagactccagatactcatattgtatacaaacctggaacagaggacaccagctctgaatccaatttgggtcagcaagccatgcctaacagacccaactacattggcttcagagacaattttattgggctcatgtactacaacagcactggcaatatgggggtgctggccggtcaggcctctcagctgaatgctgtggttgacttgcaagacagaaacactgaactgtcctaccagctcttgcttgactctctgggtgacagaacccggtatttcagtatgtggaatcaggcggtggacagctatgatcctgatgtgcgtattattgaaaaccatggtgtggaggacgaattgccaaactattgctttccgttgaatggtgtgggatttacagacacttaccaaggtgttaaagttaaaacagatgcagttgctggaaccagtggaacacagtgggacaaagatgacaccacagttagtactgctaatgaaatccatggaggcaatccttttgccatggaaatcaacatccaagccaatctatggcgaagtttcctttattccaatgtggctttgtatctcccagactcgtataaatacaccccgtccaatgtcactctcccagaaaacaaaaacacctacgactacatgaacgggcgggtggtgccgccatctctagtagacacctatgtgaacattggtgccaggtggtctctggatgccatggacaatgtcaacccattcaaccaccaccgtaacgctggcttgcgttaccgatccatgcttctgggtaacggacgttatgtgcctttccacatacaagtgcctcaaaaattcttcgctgttaaaaacctgctgcttctcccaggctcctacacttatgagtggaactttaggaaggatgtaaacatggttctacagagttcccttggtaacgacctacgggtagatggcgccagcatcagtttcacgagcatcaatctttatgctacttttttccccatggctcacaacaccgcttccacccttgaagccatgctgcggaatgacaccaatgatcagtcattcaacgactacctatctgcagctaacatgctctaccccatacctgccaacgcaaccaatattcccatttccattccttctcgcaactgggcggctttcagaggctggtcatttaccagactgaaaaccaaagaaactccctctttggggtctggatttgacccatactttgtctattccggttctattccctacctggatggtaccttctatctaaatcacacttttaagaaggtttccatcatgtttgactcttcagtgagctggcctggaaatgacaggttactatctcctaacgaatttgaaataaagcgcactgtggatggcgaaggctacaacgtagcccaatgcaacatgaccaaagactggttcttggtacagatgctcgccaactacaacattggctaccagggcttttacatccctgagggatacaaggatcgcatgtactcctttttcagaaacttccagcctatgagcaggcaggtggttgatgaggttaattacactgactacaaagccgtcaccttaccatatcaacacaacaactctggctttgtaggataccttgcgcctactatgagacaaggggaaccttacccagccaattatccatacccgctcatcggaactactgccgttaagagtgttacccaaaaaaagttcctgtgcgacaggaccatgtggcgcataccgttctccagcaacttcatgtccatgggggcccttacagacctgggacaaaacctgctctatgccaactcggcccatgcactggacatgacttttgaggtggatcccatggatgagcccaccctgctttatcttcttttcgaagtcttcgacgtggtcagagtgcaccagccacaccgcggcgtcatcgaggccgtctacctgcgcacaccgttctcggccggcaacgccaccacataa

SEQ ID NO: 85 - protein, 353 aa, Unknown
  Description of Unknown: Human adenovirus 16 sequence
MAKRARLSSSFNPVYPYEDESSSQHPFINPGFISSNGFAQSPDGVLTLKCVNPLTTASGPLQLKVGSSLTVDTIDGSLEENITAAAPLTKTNHSIGLLIGSGLQTKDDKLCLSLGDGLVTKDDKLCLSLGDGLITKNDVLCAKLGHGLVFDSSNAITIENNTLWTGAKPSANCVIKEGEDSPDCKLTLVLVKNGGLINGYITLMGASEYTNTLFKNNQVTIDVNLAFDNTGQIITYLSSLKSNLNFKDNQNMATGTITSAKGFMPSTTAYPFITYATETLNEDYIYGECYYKSTNGTLFPLKVTVTLNRRMLASGMAYAMNFSWSLNAEEAPETTEVTLITSPFFFSYIREDD

SEQ ID NO: 86 - protein, 130 aa, Unknown
  Description of Unknown: Human adenovirus 16 sequence
DGVLTLKCVNPLTTASGPLQLKVGSSLTVDTIDGSLEENITAAAPLTKTNHSIGLLIGSGLQTKDDKLCLSLGDGLVTKDDKLCLSLGDGLITKNDVLCAKLGHGLVFDSSNAITIENNTLWTGAKPSAN

SEQ ID NO: 87 - protein, 181 aa, Unknown
  Description of Unknown: Human adenovirus 16 sequence
CVIKEGEDSPDCKLTLVLVKNGGLINGYITLMGASEYTNTLFKNNQVTIDVNLAFDNTGQIITYLSSLKSNLNFKDNQNMATGTITSAKGFMPSTTAYPFITYATETLNEDYIYGECYYKSTNGTLFPLKVTVTLNRRMLASGMAYAMNFSWSLNAEEAPETTEVTLITSPFFFSYIREDD

SEQ ID NO: 88 - protein, 555 aa, Unknown
  Description of Unknown: Human adenovirus 16 sequence
MRRRAVLGGAVVYPEGPPPSYESVMQQQAAMIQPPLEAPFVPPRYLAPTEGRNSIRYSELSPQYDTTKLYLVDNKSADIASLNYQNDHSNFLTTVVQNNDFTPTEASTQTINFDERSRWGGQLKTIMHTNMPNVNEYMFSNKFKARVMVSRKAPEGVTVNDHKDDILKYEWFEFTLPEGNFSATMTIDLMNNAIIDNYLKIGRQNGVLESDIGVKFDTRNFRLGWDPETKLIMPGVYTYEAFHPDIVLLPGCGVDFTESRLSNLLGIRKRHPFQEGFKIMYEDLEGGNIPALLDVTAYEESKKDTTTETGEKAVVKTTTVAVAEETSEDDNITRGDTYITEKQKREAAAAELLLMSEVKKELKIQPLEKDSKNRSYNVLEDKINTAYRSWYLSYNYGNPEKGIRSWTLLTTSDVTCGAEQVYWSLPDMMQDPITFRSSRQVNNYPVVGAELMPVFSKSFYNEQAVYSQQLRQSTSLTHVFNRFPENQILIRPPAPTITTISENVPALTDHGTLPLRSSIRGVQRVTVTDARRRTCPYVYKALGIVAPRVLSSRTF

SEQ ID NO: 89 - protein, 940 aa, Unknown
  Description of Unknown: Human adenovirus 16 sequence
MATPSMMPQWAYMHIAGQDASEYLSPGLVQFARATDTYFSMGNKFRNPTVAPTHDVTTDRSQRLMLRFVPVDREDNTYSYKVRYTLAVGDNRVLDMASTFFDIRGVLDRGPSFKPYSGTAYNSLAPKGAPNTCQWKDSDSKMHTFGVAAMPGVTGKKIEADGLPIGIDSTSGTDTVIYADKTFQPEPQVGNASWVDANGTEEKYGGRALKDTTKMKPCYGSFAKPTNKEGGQANLKDSETAATTPNYDIDLAFFDNKNIAANYDPDIVMYTENVDLQTPDTHIVYKPGTEDTSSESNLGQQAMPNRPNYIGFRDNFIGLMYYNSTGNMGVLAGQASQLNAVVDLQDRNTELSYQLLLDSLGDRTRYFSMWNQAVDSYDPDVRIIENHGVEDELPNYCFPLNGVGFTDTYQGVKVKTDAVAGTSGTQWDKDDTTVSTANEIHGGNPFAMEINIQANLWRSFLYSNVALYLPDSYKYTPSNVTLPENKNTYDYMNGRVVPPSLVDTYVNIGARWSLDAMDNVNPFNHHRNAGLRYRSMLLGNGRYVPFHIQVPQKFFAVKNLLLLPGSYTYEWNFRKDVNMVLQSSLGNDLRVDGASISFTSINLYATFFPMAHNTASTLEAMLRNDTNDQSFNDYLSAANMLYPIPANATNIPISIPSRNWAAFRGWSFTRLKTKETPSLGSGFDPYFVYSGSIPYLDGTFYLNHTFKKVSIMFDSSVSWPGNDRLLSPNEFEIKRTVDGEGYNVAQCNMTKDWFLVQMLANYNIGYQGFYIPEGYKDRMYSFFRNFQPMSRQVVDEVNYTDYKAVTLPYQHNNSGFVGYLAPTMRQGEPYPANYPYPLIGTTAVKSVTQKKFLCDRTMWRIPFSSNFMSMGALTDLGQNLLYANSAHALDMTFEVDPMDEPTLLYLLFEVFDVVRVHQPHRGVIEAVYLRTPFSAGNATT

SEQ ID NO: 90 - protein, 42 aa, Unknown
  Description of Unknown: Human adenovirus 16 sequence
MAKRARLSSSFNPVYPYEDESSSQHPFINPGFISSNGFAQSP

SEQ ID NO: 91 - DNA, 114 bp, Unknown
  Description of Unknown: Human adenovirus 21 sequence
ctatctatataatataccttatagatggaatggtgccaatatgcaaatgaggtaatttaaaaaagtgcgcgctgtgtggtgattggctgcggggtgaacggctaaaaggggcgg

SEQ ID NO: 92 - DNA, 114 bp, Unknown
  Description of Unknown: Human adenovirus 21 sequence
ccgccccttttagccgttcaccccgcagccaatcaccacacagcgcgcacttttttaaattacctcatttgcatattggcaccattccatctataaggtatattatatagatag

SEQ ID NO: 93 - DNA, 365 bp, Unknown
  Description of Unknown: Human adenovirus 21 sequence
gcaatgctgggaggtgacgtaacttatgtaggaggagttatgttgcaagttatcgcggtaaaggtgacgtaaaacgaggtgtggtttggacacggaagtagacagttttcccacgcttactgacaggatatgaggtagttttgggcggatgcaagtgaaaattctccattttcgcgcgaaaactgaatgaggaagtgaatttctgagtcatttcgcggttatgacagggtggagtatttgccgagggccgagtagactttgaccgtttacgtggaggtttcgattaccgtgtttttcacctaaatttccgcgtacggtgtcaaagtcctgtgtttttacgtaggtgtcagctgatcactagggta

SEQ ID NO: 94 - DNA, 3432 bp, Unknown
  Description of Unknown: Human adenovirus 21 sequence
tttaaacctgtcgagttccgtcaagaggccactcttgagtgccagcgagaagagttttctcctccgcgctgcgagtcagttttgcgctttgaaaatgagacacctgcgattcctgccacaggagattatctccagcgagaccgggatcgaaatactggagtttgtggtaaataccctgatgggagatgacccggaaccgccagtgcagcctttcgatccacctacgctgcacgatctgtatgatttagaggtagacgggcctgatgatcccaatgaggaagctgtaaatgggttttttactgattctatgctgctagctgccgatgaaggattggacataaaccctcctcctgggacccttgataccccaggggtggttgtggaaagcggcagaggtgggaaaaaattgcctgatctgggagcagctgaaatggacttgcgttgttatgaagagggttttcctccgagtgatgatgaagatggggaaactgaacagtccatccataccgcagtgaatgagggagtaaaagctgccagcgatgtttttaagttggactgtccggagctgcctggacatggctgtaagtcttgtgaatttcacaggaataacactggaatgaaagaactattgtgctcgctttgctatatgagaatgcactgccactttatttacagtaagtgtatttaagtgaaatttaaaggaatagtgtagctgtttaataactgttgaatggtagatttatgtttttacttgcgattttttgtaggtcctgtgtctgatgatgaggcgccttctcctgattcaactacctcacctcctgaaattcaggcgcccgtacctgcaaacgtatgcaagcccattcctgtgaagcctaagtgtgggaaacgccctgctgtggataagcttgaggacttgttggagggtggggatggacctttggaccttagtacccggaaactgccaagacaatgagtgccctgcagctgtgtttatttaatgtgacgtcatgtaataaaattatgtcagctgctgagtgttttattgcttcttgggtggggacttggatatataagtaggagcagatctgtgtggttagctcatagcaacctgctgccatccatggaggtttgggctatcttggaagacctgagacagactaggctactgctagaaaacgcctcggacggagtctctggcttttggagattctggttcggtggtgatctagctaggctagtgtttaggataaaacaggactacagggaagaatttgaaaagttattggacgacagtccaggactttttgaagctcttaacttgggccaccaggctcattttaaggagaaggttttatcagttttagatttttctactcctggtagaactgctgctgctgtagcttttcttacttttatattggataaatggatccgccaaacccacttcagcaagggatacgttttggatttcatagcagcagctttgtggagaacatggaaggctcgcaggatgaggacaatcttagattactggccagtgcagcctctgggagtagcagggatactgagacacccaccggccatgccagcggttctggaggaggagcagcaggaggacaatccgagagccggcctggaccctccggtggaggagtagctgacctgtttcctgaactgcgacgggtgcttactaggtctacgtccagtggacaggacaggggcattaagagggagaggaatcctagtgggaataattcaagaaccgagttggctttaagtttaatgagccgtaggcgtcctgaaactgtttggtggcatgaggttcagagcgaaggcagggatgaagtttcaatattgcaggagaaatattcactagaacaacttaagacctgttggttggaacctgaggatgattgggaggtggccattaggaattatgctaagatatctctgaggcctgataaacagtatagaattactaagaagattaatattagaaatgcatgctacatatcagggaatggggcagaggttataatagatacccaagataaagcagcttttagatgttgtatgatgggtatgtggccaggggttgtcggcatggaagcagtaacatttatgaatattaggtttaaaggggatgggtataatggcattgtatttatggctaacactaagctgattctacatggttgtagcttttttgggtttaataatacttgtgtagaagcttgggggcaagttggtgtgaggggttgtagtttttatgcatgctggattgcaacatcaggtagggtcaagagtcagttgtctgtgaagaaatgcatgtttgagagatgtaatcttggcatactgaatgaaggtgaagcaagggtccgccactgcgcagctacagaaactggctgcttcattctaataaagggaaatgccagtgtgaagcataatatgatctgtggacattcgaatgagaggccttatcagatgctgacctgcgctggtggacattgcaatattcttgctaccgtgcatatcgtttcccatgcacgcaagaaatggcctgtatttgaacataatgtgattaccaagtgcaccatgcacataggtggtcgcaggggaatgtttatgccttaccagtgtaacatgaatcatgtgaaggtgatgttggaaccagatgccttttccagagtgagcttaacaggaatctttgatatgaatattcaactatggaagatcctgagatatgatgacactaaaccgagggtgcgcgcatgcgaatgcggaggcaagcatgctagattccagccggtgtgcgtggatgtgactgaagacctgagacccgatcatttggtgcttgcctgcactggagcggagttcggttctagtggtgaagaaactgactaaagtgagtagtggggcaatatgtggatggggactttcaggttggtaaggtggacagattgggtaaattttgttaatttctgtcttgcagctgccatgagtggaagcgcttcttttgaggggggagtatttagcccttatctgacgggcaggctcccatcatgggcaggagttcgtcagaatgtcatgggatccactgtggatgggagacccgtccagcccgccaattcctcaacgctgacctatgccactttgagttcgtcatcattggatgcagctgcagccgccgccgctactgctgccgccaacaccatccttggaatgggctattacggaagcatcgttgccaattccagttcctctaataacccttcaaccctggctgaggacaagctgcttgttctcttggctcagctcgaggccttaacccaacgcttaggcgaactgtctaagcaggtggcccagttgcgtgagcaaactgagtctgctgttgccacagcaaagtctaaataaagatctcaaatcaataaa

SEQ ID NO: 95 - DNA, 19688 bp, Unknown
  Description of Unknown: Human adenovirus 21 sequence
atggccagccgcggaggaaatcagtcaagcgaccgccaacgggagcacacccccgaacgcggaatgggctctgccagccatccgcctccaaggccggaccgcagcccatctcagtcgcctccacctctgcccccgaagaggaacacctaccgtcgcgtggggtccgattcttctatcgagagccaggtggtactggtaagcgaaacttcgcggtcatccctgtctccggaacggagcaacagtcctcccccgatccctcccaagaagaagcccaggaagaccaagcatgtccctctgcaagacatcagccaggacagcgaagaagaaagagaacaggctcagttggtggccgtgggcttcagctaccccccggtgcgcatcattgagaaggatggcaagagaagtgttgagaagatcgacaagaatgaccctatagctaaaggagctacttctattgctgttaggaatcctttgagcttgcccctggtatctgcctgggagaagggcatggaagtgatggctgtgctaatggagaggtataggctggataatgacctgagaacctctttcaagctgatgccagagcagcacgagcagtacaagcgtatctgccaccagtatgtgaacgaggagcaccgtggcatcccgctgacatttagtagcatgaagaccctgacagcgatgatgggaagattcatgcagggattggtgcattcttattctgagatcgcccacaataattgggagtgcaccgggtgcgctctgtgggctcatggatgcaccgattacgaaggcaaggtgaaatgcctgcatggcactattatgatccagaaggaccacattatcgagatggatgtggcgagcgaaaacgggcagcgcgctatgaaggagaacccagacagagccaagatcacccagaaccgctggggcagaaatgtggtccagttggccaacaacgatgcccgctgctgtgtgaatgatgccaactgtgctactaaccaattttccagcaagtcctgtgggatgttttacaccgagggaagtaaggctcaggaagctttcaagcagtacgaagccttcatgaaggccgtgtacccagggataacccccgaccaagccaggatgatgctgatccccattcattgcgattgcaaccacaagccaggctgcgctcccgtgatgggcaggcagacctgtaagatgaccccctttggaatggccaatgctgaagacttggatgtgactaccatcagtgacccgaccgtgctggcaagcgtgagacacccagccttgatggtgttccagtgttgcaacccagtgtaccgcaactcccgtgtccagaatgccggccccaactgtgatttcaagatctctgctcctgacctgcttggcgccctgcaactgaccagaaagttgtggcaagacacctttcccgaaattccagttcccaagctggtgatccccgagttcaagtggcagaacaggttacagttccgcaacgtctccctgcccacgggtcactctgactcacgccagaacccatttgatttctgagtgaatgatgaaaacgaatgagcaaaaaaccagagccttagtgcatgtaaaaataaagtgctttttattgaacacggttttacatgacttattgcatatccatacggtcaaacgcggtggccctttcgatgcgtgcgcggtgagaacgaaagtaagatgagtgggtgtttaggaagcgatatagcgcctcctggttgcgacgcagggtgggctggacttggggtgattggagcatgctgtttgacaccccagtcagcaacttcatggtggggtttccgttcatggggcggtcgggccagtgcacaaaggcatgaaggaacatacagcaaaaaagtccacaggcggctgagcgcgggccctgcacgctctgggtggacttttccagggtgatgcagcggtctttggtagcaagggcactgcggcgcaggagcccctcgtactcaaactggtaaatctgtttgagtcgctcatccgagaacccaaaaggatcaaaaaggtagcaggtgttggagcgcgggttccaaccaaaagccagccagtgctctccccccgtctcgcgtccggcagtgttgactatggcgcaggcgagcttgtcgggggccatgaaccccgggaaacgcttgtcaaaggttcccaggaaatagggtccgcagcccaggtctcggacgatggctttgagctcttgctcgctggagccgtttccggacccgcatgacatggctgcagctgctgcttgcaagaagcaagaggcttcttatgtggtggcgttgccggccgagaacggtgtgcgcaggtagacggcctcgatgacgccgcggtgtggctggtgcactctgaccacgtcgaagacttcgaaaagaagataaagcagggtgggctcatccatgggatccacctcaaaagtcatgtccagcgcatgggccgagttggcatacagcaagttctgtcccaggtctgtaagggcacccatggacatgaagttgctagagaatgggatgcgccacatggtcctgtcgcacaggaattttttctgggtgacactggttactgcagtggttccaattagggggtatgggtagttagcagggtacgcttgaccctgacgcatggtaggagccatgtaacccacaaagccagagttattatgctggtagggtacggcgacagctttatagtctttgtagttaatctcatcaaccacctgtctactcatgggctggaagtttctgaagaaggagtacatgcgatccttgtaaccctcaggaacgtagaagccctggtatccaatgttgtagttggcaagcatctggaccaggaaccagtctttggtcatgttacattgggccacattgtagccttccccatcaactgtgcgcttgatttcgaactcatttggacttagcaatctgtcattaccaggccagctcactgaagagtcaaacatgatggagactttcttgaaagtgtggttaaggtagaaggtaccatccaggtagggtatagaaccagagtaaacaaagtagggatcgaaccctgatcccaaagagggagtctccttggttttgagtctggtgaaggaccagcctctgaaggcggcccagttgcgagagggaatggagatgggaacgttggtagcgttggccgggatggggtagagcatgttggcagcagaaaggtagtcattgaatgattgatcattggtgtcattgcgcagcatggcttcaagggtggaggcagtgttgtgggccatggggaagaaggtggcatagagattgatgctggtaaaacttatgctggcaccatcgacccggagatcattaccaagggaactctgcaggaccatgttcacatcctttctgaagttccactcgtaggtgtaagaaccgggtagaagcagcaggttcttcacagcaaagaatttctgaggcacttgaatgtggaaaggcacgtaacgaccattgcccaaaagcatggaccggtatcgcaggccagcgttgcggtgatggttaaaggggttgacattgtccatggcatccaaagaccatctggcgccaatgtttacgtaggtatccaccagggatgggggaaccacccgcccattcatgtagtcataagtgttggtgttagttggaagagtgacattggctggggtgtatttgtaggagtctgggagatacagagccacattggaataaagaaaacttctccagagattagcttggaggttaatttccatggcaaagagatttccttgtccaatttcacttgttccatttatgtcaggctctttccaatctgcaccctgtccgtttggttcaattattttgtaactacttattggtacccctactccatccaatggaaagcagtagttgggaagctcatcttccaccccatgattttcaataatgcgcacatcaggatcatagctatcgactgcttgattccacatgctgaagtatctggttctgtcacccagagagtcaagcagtagttgatatgatagttctgtgtttctgtcctgcaagtcaaccaccgcattcaattgggatgcttgacctgccagcactcccatgttgccagtactgttgtagtacataagtccaataaagttatctctaaagccaatgtagttgggtctgttgggcatagattgttgacccagattagcatgagaactttcttctgaagtaccaggtttgtacaccacatgagtgtctggggtttccaagtctacattttctgcatacatcacaatttttggactgaagtttgctttctgtgacgcttcatcaaaaaagttcatgtcaatatcatattcaacctgctggttttgcggttgttcagtagttttttgttttgcctgtccgcctttgacgttagtgggtttagcaaaagacccatagcagggtttcattttagtttctggctttagagctctaccaccatacttctcagttgttccatctgtgtcagtccaagtttcatctcccacctgaggttctggttggtatagtttatctgcataaattggtttggcttcgccgtctgtaatttctgaaccaattggaagacctttgtctttagtgatatcaccaccttctgctttcactggggcatttccaaaagtgtaagtggtgagatttttctcttcctcttcgtcagatcccccatcttctttttttacgccttcagcaatccactgagatgtattgggagcgcccttaggggccaacgagttgtaagcagtgccagagtatggcttgaagctagggcctctatccaacacaccccgaatgtcaaagaaagtgctggccatatccagcactctgttgtcgcccacagccaaggtgtatcgaactttgtatgcgtaggtattgtcttcccggtcaacgggcacaaagcgcagcatcagccgctgactgcggtcggtggtcacatcatgggtgggcgccacggtggggttcctaaacttgttccccagattgaagtaggtgtctgtggcgcgggcgaactgcaccagacccggactcaggtactccgaagcatcctgtccggcgatgtgcatgtatgcccactggggcagcatcgatggggtggccatcttgaaatcaactcagcctcggcgcgcgacctcttccttgctcctctgctgttgctgcggcggcggcgtgatgatgacacatacacacagacaggcaagttaagcgctactccatattaatttaaaagcagcgacggcgctttacactttgcacgcccagacccacgatgctgttcagagtactctgccagtttgcattcggacgtggagtgcccccaggacgcggtctggctacggcgacgggctgtacggtggtgggcttcggggtagcgacaggcttgcgagcaggcgctgcaacagcagggggaggcaagtccaaggtagcgggtcggtgtgactgagaaggtttcattaccccggtagccatgggggctacaggtctggtggtgggcattccaagcttcactgcctcctcgtaggagggcgggtcgtctgagcgtgtgactagtgtctcctccagatcggggcgcggacgcttgtcgccccgcttttcaaggggagggagatcttcctccacttccatttcacccggggctgacggcggcgggtcaatgcggctgtttatctgtttctgcacggcctggttggccagatccaccaccccattgataccagaggcgattccatcaaccaccttctgttggaagttttgctctttaagcttatttctcaatgcctgccctgtgctgctgttccaagctttgttcccataggtttttatggtagagccaaaatttttaagcccgctccagatactgctccaattgaaggcgcccccgttcagttggctggtgccgatgtcgctccaggtgcccatgtacggcctcgtgccgtgtcgcggagccagggatgaaaaattgatgtcttccatctctacaaaaacatagtcacaggaccaggagcatcagagtccattctgttttatttataagtttttccaatgtcagtggcgctgcgaggcctgaaccgccacggaagctatgcctggtatcgccccgatcgccgcggctatgatggggatcagagcaggcagaaagccaccccccagcctcttgctgatagcgcgccgccgcctgtggcgtcgcattccgcgccccaacatccctcttctacggcgcgagtttcttcctcggtagccagtaatggggacacgaaggcggcaagtgagggccatatctgcaaggaggcagcggcaacagttgttaagttgtgatgcttggatggtagcgtacgcgcggcaacgtcaggggatccgcgcggccatcgcgatacactctccgcaccagagcagcgggagtcagattgctggtggggcggcggcgacgacggtgactacgacttgcaggtgttttgcggcgacggcgggaagtgctgctcctgctgcggtagtagcgagtgcctcggtaacccggagttggaataatggatgggtgcagagcataatttggcatcagcaaacttgctggaccgtactttcgccgggatcttcgagtggtgttgacagcagctggagttgtaacgggtgcggtcatccagggatccgtttgcacctcaatggaggtggttgtgggctttgcaggttcggtttggacttccatggactcggtgggaatcttgatgtctacggtttgtactcccaaacctggcgccacctgcttgatgggtctcactttgacctcaggttgtatatcgggatccactttcattttctccagcacgtcctccagccgctggcgcttgggcaccatcaattgcatagtgggatacagatcctcaccctctcgcttgttgcctctgcgtggaggcacgggcagcacttgctgcagggtgactggcttgagactaggggtgggattcccattgtccaagggaatggacaccgcctcctccttggggctcgagcgggagcgcttgccataagcaaactcgcccaggcggtcggccgcctgctccagaatatcatcatccccatacacctcatcataggaccgcttaaaagcagtgctggagcgctcgccgggcgtaaagaccaccgtggttccaggtctcagcacaggccgcactttgcgtccacgccactgcacacgccgccttggggcgaactcgcgtacaaactccgccagaccatcattgccatcttcttcctttttgtcctttttgacccgcttgattttgcggggctttttttcatccttcaccggcggaccgtagatttcaggcgcgatgacctggagcatctcttccttgtatttgcgcttggacatcctcgctgggacacaacatcggagactgctcagtatcttctaagagcgaggggggcgggtgcgcacgggcacgcgctggccggtggtggcgtcgcgcacccagtacacattgcctcttcgcggttgggccatgttggcaatggccgctgctgccgccgtggctgcgcgcctgcgggacctgccggcactggcacctgaagccgcgcgtctggccgctctaagcatagctcttcgccccacgcgtttggccctccgtagcagagctcttgccgctcgcatagcgggagtagcccggtggcgcctggcgatgcgtctccgcctgctcttccggcgagcataggcgcgggcgtcagccactacgctgtcaataactgcatccacagtagatgtaggtgcagtaggagtataattacgagcatcggccaccacctggtcgatcacatcatcgacggtggttctagtgcgggcacgacccttgagggcgccccatggagcgcggaagtgcccgcgcacgcgcacagggtgctgtgtagagcgtttgcgagcacctccgtacatcttgcttggcgcgcgcaggccccaaccggtgttattactaggtgagataagaatggacatttttttttttagaaagtgcggcttgaaaggacgcgcggcgcgactatgcccagggccttgtagacgtaggggcaggtgcggcgtctggcgtcagtaacggtcacgcgctggactccccggatactgctgcgcaacggcagggtcccgtgatctgtgagagcaggaacgttttcactgacggtggtaatggtgggcgctggcgggcggatgaggatctggttctcagggaagcggttgaagacgtgcgtgagcgaggtggactggcgaagctgctgggagtacacggcttgctcgttgtagaaactctttgagaagaccggcatgagctctgcacctaccactggatagttgctgacttgtctcgtggaacggaatgtgacagggtcctgcatcatgtctgggagcgaccagtacacctgctctgctccacaggtgacatccgaggtggtgagcagtgtccaggaacggactcctttttcagggtcaccatagttgtaggacaggtaccagctgcggtaggctgtattcactttatcttccaagacattgtaacttctactcttgctgtctttttctacaggtttaatagtgagttttgtctctgtagtttcggccacagcagccaatagcgattcgtcagttgcaacagatgaagctgtatagttgtctcctctgacttcttctgcattagccacccttacagggtcgctgacaactatgttggctttagcaatagcagcagctttagcggcttctgttttggcttcttgttctttcttactgttctcataggcttctacatccaacagggccgggatattacccccttcaagatcctcatacaagatcttaaaaccctcctggaatgggtgtcttttcctgataccaagcaagttactaaggcgactttcagtaaagtcaactccgcaaccaggcaacaatacaatgtcaggatggaatgcctcataggtgtaaaccccaggcataatcaacttagtttccggatcccaacccagtctaaagttcctggtgtcaaatttaacaccaatgtcactctctaacactccattctgtctgcccacttcaaggtaattatcaatgatggcattgttcattaggtcaatggtcattgtggctgagaaattcccttccggtagagtaaactcaaaccactcatattccaaaatatcctgcttgtgatcataattgtcatctactgtgacaccttcaggagcctttctagacaccatcacccgagctttgaacttgttgctaaacatgtactcgttcacgttgggcatgttggtgtgcatgatagtcttcagctgaccgccccatcgcgaccgctcgtcaaagttgatggtctgggtgctggcctccgtgggggtaaagtcattgttttgcaccaccgtggtgaggaagttgctgtggtcgttctgatagttcagtgaggcgatgtccgcggacttgttgtccaccaaatacaaccgggtggtatcatacaatggtgccagctccgagtaacgaatgctgtttctcccctccgtaggtgccaggtaccgagggggtacaaagggagcctccagtggtggctgcatcgtcgccgccgccgcctgctgcatcacgctctcgtacgaaggaggaggaccctccggatacaccaccgctccgcctagcacggttcgcctcatcatactagatataacagagaagaaacgaacgcacgctggtcgccatggccttggtgagtatttattttcggtttcttacatcaggcgcccgacgcgggggcgcaggtgagcgaacgggttaccaccactcccacccaagtccaacacgctgctgtcgtcggcggaatcatcatcggcccacaccaggccccgctgcctgtcgtgccactggcgtttacgggtagcgctgccccggctatcccccagcgcccggggatcgtgcgcgtacgtcttccagcggttcattttgtcaaccaagctttctatcccgttgttggggaaattcttctccctctcgggtctcaacagggagtcgttcaaatactcctcctcgccgatcaagcgaggacgggttattcttcccagctcactgctgcgtacactgtttagcgaaaatggcaaactagggaaaggacttgcggcctcgggagccgctgcggcagcacccgttgccccggacagtgacacggaagagtgccttctatcgccaccttccttcttccaagtgttataaccaggaggcggggagaaaacactactgtccacatcgtcccataaaaacccgtcattgggtcgggcaatgtcatactcgcccgtatagaacccaggtgggggcagccaatgggggttcaggatagcattggtgaaataatcagagttcatagcagccgccctgtgtaagtagtctagcagtttattgataaaaggccggttactggcatacatgctgggctccatgtttcgggctgtcatatcgagcgcagcagtaggagtcgccccctcctgcattaggaacagtcccacgctctgctgcacgtatctcaggatccgttcctcctccgcggtaagcgcatactgaggagggatcttctgcgaccggttggtcagcaagaagtttaaggtggcttccaagctgccagtgtcctcccgacccagagcgcggctcacttgggtaatttcttgataggtttgctcatctacctgagtttgccctatggcctcgcgatacaggttcaacagatagcccaagtacgaattacggtcgatgctaccgctgtcagtgaatggggctaccaagagcagtagtaggcgggagttgggggtcagcaagctagacacggtcgcccgatctcccactggggcgcgcactccccacagaccattcaggttcttaaaagcctggctcaggttcactgtctgcaagccctgtctgctggtctggaaaaagtagtctggcccggactggtacacttcgctttgagggacttcggccaccatgagtctcaatgcacttagaaagtttgtgtagtcttgctgaccgcgaggcacgttggcaggctgagtgctgaggaaggcgttcaaagccaccagcgaccctaaattggcgtctcgctggaaccgctcgcgctgagacacggcctcgcgcacatcggtcaccatccggtccaggttggtctgcacgttgctgctgttgtagcgggctacgcgctccaatagggcattgtataccagcccagcctcatcgggacgtatggctttgttctccaccagcgcgttcacgatggccaggaccttctcgtgtgtggggttggagcgggagggcactacggcctccaggatagcagaaaggcggttggcctggggttgctgcctaaaggcttcggggttgcgggtcgtcagcgccatgatgcgttgcatggcctggctccaatcgtccgaggagttaatgccggacggctggctctgtagcgccgcccgttttgcggggtccggtgcctgctgttccatctagcaaaaatatggatggtcgcgccatcagtcttccaggtactcgccctcctcatcctggccttcatccacctcttctatgtaaggaagctcataccctgctgcgtccagggccctgcgactgggctgccattgcaagtccgctcccatgtcaaagtagttctccccctcggttccagccccagtcagagctctttgcaagctgtgcataagttctctgtcgctcagctcacgccttctgctggcgctcactgcgcggtgcatcctgtcgttgcggtacactcccagatcgtcactcaaggtcagcaccttgagagtcatgcgcatataaaacccatctatcttcacctccttgtctataggtacgtatggggttttgtagatcttgcgagcgtagtgcttgcccaggctcaagaccgagtagttaatagcagccaccttctcagctagacccaggctacgttcttgcactattatactttgcagaatattgataagatcatacaaccatctcccctcgggctcagtaatgttcaacagcgcctccctaaatgcctcattgtctctactatgttgcaccaccagaaacagctgagcggttagaggtttgctggtggggttctgggtaatggcttccatcaggtcccacaggtgcatcagtcccagtgtcacttcctcgcgggcaatcagggtgcgcacatggttgttgaaagatttttgaaagttgcgctcctccttcacggtctgctcgtaagctgatactaggttggccgcggccacatgtgccctagcaggacttattcctgtcacttcatcgacttcaaaatcatcatcacgcagcacccgtcttcggtccagaccgtgacgcagttcgcgacccgcgttaaagcgggaagctcgcatttcctcaggctcctcgccgctcctgtccctgaacaggttctgctggggcacgtacgcctcgcgagagtcctttttcagttgcacccgcgggtgccgctcgggcgatggtgcgcccaggcgcgccagtccctcgccctcttccaagtccagatcataggcgggctgccccgcgccgctgacggctgcagccgcagtagttacaggagcaggaagagccttttgtggctgttgttgtagctgctgctgagaagggggctgttgctgggggcgcatctgtcgcagcacgggatgcatctgggcaacaaaaaaacaaaaaaagagggctcgctcccgtaaactggagaagtcggctggcggggtcttagaaatgacggggctgccaaaccctcgcttgtcgcggaaaccggccgatccggcgcgctaagactcgaaccggggcacaccgcaacgcaaccctggcgattgattctccagactacgggcgcgagccactcccagccccgagaactgagtgttctaaagcttgacgcagcactggctcccatccaggaaaaagcaaaaaaaaaaaaaaacgacccgcctccgtatcctggaggttttgtgcaggcctgggtcgagacgggagtgccagtaccacgttagctgcggctccagcctgatccgagattcgaaccggggtacacgcgcagcccaacccgttcgcttagcctccaggccacggagacgagccgctgaccgctttcgtttttgcccgtatgtctagagcatcaacgactgtgcacgtctcacgggccaaaccgtgcctaccatgaactacttcatgccgctgcgcaacatctggaaccgcgtacgcgagttcccgcgggcatccaccaccgcctccggtatcacctggatgtccaggtacatctacggttatcaccgcctcatgctggaagacctcgcccctggcgccccggctacagagcgatggcccctataccgccagccgccgccgcactttcttatcggctaccagtacctggtgcgcacctgtaacgattacatctttgacacccgcgcctactcgcgcctcaagtacaccgagattgtgcgtccggggcaccagacagtcaactggtcagtcatggccaactgctcctacacaatcaacaccggggcttaccaccgcttcgtggactttgacgacttccaagccaccctcacccaggtgcagcaagccatcctcgcagaaagggttgtagcggacctggcacttgtccagcccatgcgcgggttcgggatcactcgcatgcatggcagagcgggcgaagaagaagtgcccgtggaacgactcatgcaagactactataaagatctggccagatgtcaggataatgcttggggaatggcccatcgcctgcgcatccaacaagccggacccaaagacctggtgctcctcgccaccatccgccgtctcaaaactgcctattttaatttcatcaccagcagcatcgtctcaccctccaaagaggaggaaggagaagaaagagagaaccccgaccgagcgtctagccgcccccgcccgcaagaaacagtgctcagcctaccttgcgattgcgactggttagacgctttcgtcgaaaggttttcagatcccgtggatcttgagacgatcaggtccttgcgcggagtacctacggggcaattgataaaatgcataatcagcgcggtgtccctgcccaacggagagcctcccagtcaccacttcagggagatgcgcggaggcgtcttcactctgagacccagggagaacggtcgtgccgtcaccgagaccatgcgccgccgccgcggagaggtcattgaaagattcatcgaccgtctgcccgtgcgccgccggcgtcgccgcgttccccctcctcctgcagccccacctgaagaggaagagatgttagtggaagaagaagagattgaggaagaaatcccaggggctttcgagcgcgaggtgcgcaccaccgtcgccgaactcatccgtcttctggaagaggagttgaccgtgtccgcgcgtaactcccagtttttcaactttgccgtggacttctacgaggccatggagcgcttggaagcgctgggcgatgtcagcgagatgccgctgagacgatggatcatgtatttcttcgtcaccgagcacatcgccaccacactcaactaccttttccagcgtctatgcaactatgcggtcttcacccgccacgtggagctcaacctcgcccaggtggtcatgcgcgcgagagatcccgtgggggctgtggtctacagccgcgtctggaacgaggcgggcatgaatgcattctctcaactcattgggcgcatctccaacgacctggcggccaccgtcgagagagcgggccgcggagatcttcaagaggaagagatcgagcagttcatggccgagatcgcctaccaggacaactctggcgacgtgcaagaaatccttaggcaagccgccgtcaacgataccgagattgattctgttgaactctctttcaggttcaagctcacggggccggtagctttcacccagaggcgtcagatccaggatgtcaaccgccgcgtcgtcgcgcatgcgagtcttctcagagcacagtaccagaacctacccgcgcgcggcgccgacgtaccactgccagccatgccgccgggtcccgaaccgcccctgccgcccggtgcgcgccctcgacaccgcttctaaacatgcaagaagcaacagagccaccgccgcccaaaaggaaaaacaagggcacggtggtagcacccaaggggcacggaaccctgcaagccatcgacatctccaccaacggacccgtggagatcaagtaccatctgaacctccctcacgccctcgaaaagatcatgcaagtcaatctcctgacactgcctactaacctgactccgcagcgtctcaggaccctggacagctccggcctgcgcgctctcgtcctcgagctccgcccctgccgcgccgaggtctggacttgcctcccgcgagggctcgtcagcatgaccaccatcgagacagaagatggtcatgccgatgcagacaacatagtagagcgcgaggtacaaacgccaggcctcaattttccactgaaatttctcgtcaaaggaagtcaggtacaactcattcatgaggtgcatcccgtgaatcgctgcgagtactgcggccgtctgtacaagcacaagcatgaatgctcggcgcgtcgcagggagttctacttccatcacatcaacagccattcctccaactggtggcaggagatccagttcttcccgattggctctcatcctcgcacagaaaggctcttcctcacctacgatgtggaaacctacacctggatggggtcctttggcaagcagctaatccccttcatgctggtcatgaaactctctggagaccagcggctcgtcaacatcgcctatgacctcgccatgaaactcaagtgggatcgctggcggcaggacccccaaaccttctattgcgtcaccccagaaaagatggcagtcgggcagcattttcgtcagtaccgggaccagttacaaacagcactggcagtggacctctggtcctccttcctcaaagcgaaccctcacgtgcacgaatgggccctcgaacactatgctctcactgaccctacagatctcacttttgaagaactcaagaagctgcctcatgtcaggggcacccctcgattcttagaactgtacatagtggggcacaacatcaatggctttgatgagatcgtcttggccgctcaggttatcaataaccgagcagaggtccctcagcctttcaaaatcacccgaaatttcatgcccagggccggcaagatcctcttcaatgatgttactttcgctttgcccaaccccgcctacaagaagcgggtggacttccaactctgggaacagggggcctgtgatgacattgacttcaagtatcaattcctcaaagtcatggtcagggacacttttgccctcactcatacctcgctgcgcaatgcagcccaagcatactctcttccagtggagaagggatgctgtccctacaaggcagtcaatcagttctacatgttgggctcttaccgtgcagaaaaagacgggtttcccctcgaagagtactggaaggatcgcgaagaataccttctcaaccgcgagctgtgggaaaagaaaagccaaccgcgttatgacatcatccaggaaactctcgactactgtgccctggatgtactcgtcaccgccgagctggtagccaagctgcaagagtcatatgcccacttcataagggactctgtaggcctacctcatgcccattttaacatattccagagacctactatctcttccaattcccatgccatctttcgccagatcgtttacagggcggaaaaacccaaccgcaccaatctgggcccgggtcttctcgccccctcacatgaactctatgactatgtgcgagcaagcatcagaggggggcgctgttatcccacttacatcggcatcctcgaagagcccctctatgtctacgatatctgtggcatgtatgcctccgcgctcacccaccccatgccctggggcacccctcttaacccctatgagcgcgcgctggcagttcgagaatggcagatgaccttggatgatcccgccaccatcagctattttgacaaagatttgctaccgggaatatttaccatagatgcggacccccctgatgagttcatgctagaccccctcccacctttctgttcaagaaaaggaggtcgactctgctggaccaatgagcccctccgaggcgaggtggccaccagtgtggatctgataaccctgcacaataggggatggcgagtcagaatagttccggatgaactgacaaccatcttccctgaatggaaatgtgtggcgcgcgagtacgtccagcttaacatcgccgccaaggagcgcgcggacaaggaaaagaaccaaaccatgcgctccatcgccaagcttctgtccaatgccctttatggatcatttgccaccaagctggacaacaagaagattgtgttttctgaccagatggacgagagtcttatgaaaggcgtctctgctggtactgtcaatatcaaatcctcctcgttcctagaaactgacaacctgagtgcagaggtcatgcccgccttcgagagggaatacctaccccaacagctggcgctcctggacagcgatcctgaagacagtgaggacgaacagaggcccgcccccttttatacccccccggcggggacccctggtcacgtggcctacacttacaagccaatcacattcttggatgtggaggagggggacatgtgtttacataccgtagagaaggtggacccactggttgacaacgaccgctacccctcccacgtggcctcctttgtgctggcctggacacgcgcttttgtatcagagtgggctgggttcctctacgaagaggaccgaggcactccgctcgaggacaggcccataaagtcggtctacggggacacggacagcctctttgtcacccagcggggacacgaactcatggaaaccaaaggtaagaaacgcatcaaaaaacatggcggaaaacttgtttttgaccccgatgagccggatctgacctggctcgtggagtgcgaaaccgtctgcgcctcctgcggtgcggatgcatactcccccgaatccattttcctcgcgcccaagctgtatgccctcaaatgtatctactgccccgcctgccataaaacttccaaaggtaagctccgtgccaaaggccacgcggccgaggcgctcaactacgaactcatggtaaactgctacctggccgacctgcagggcgccgatcggcagcggttctcgaccagcaggatgagtctgaagcgcaccctcgcaagcgcccaaccaggcgcgcaccccttcaccgtgacggaaacaaccctgactcggacgctgcgaccatggaaggatcggaccctagcagcgctggacgcccatcgtctgattccctactccaggagccgtcccaacccgcgaaacgaggaggtctgttggatcgagatgccatagagcacatcaccgagctctgggaccggctcgagctcttgcaacagactctttccaaaatgcccatggctgacgggctgaagccgctgaaaaacttctcctcgctccaggagcttctatcccttgggggagagcgcctcctaacggacttggtgcgggaaaatatccatgtaagggaaatgatgaacgaagtggcccccctgctccgggaggacggcagctgtcgctccctaaactaccatctgcaacccgtaattggggtcatttacggtcccactgggtgcggcaagtctcagctgcttaggaatttgctctcatcccagttaatcaccccggctccagaaacggtattttttatagccccgcaggtggacatgatccccccctcggaactgaaagcctgggaaatgcaaatatgtgagggaaactatgctcccgggccagagggaactttcatcccccaatctggcaccctccgcccaaagtttattaaaatggcttatgatgacctgactcaggagcataactatgatgtttcagacccccggaacgtgttcgcccgtgccgctgcccacggccccatcgctatcattatggatgagtgcatggagaatctggggggtcacaaaggcgtctccaaattttttcatgcttttccctctaagctgcatgataaatttcccaagtgcaccggatacactgtcttggtggttctgcacaatatgaatccgagacgggatctaggcggcaacattgccaacctcaagatccagtccaaaatgcatataatttcacccaggatgcacccgtcccagctcaacagatttgtaaacacctacactaagggcctccccgttgcaattagtctgctcctaaaagatattgtgcaacaccatgcactccgaccttgctatgactgggtgatttataacactaccccggagcaagaggctcttcaatggagctatctccacccccgagacggactaatgcccatgtatctaaacattcaatcccacctttacagggtactggaaaagatccaccgagttctcaatgatcgagaccgatggtccagggcataccgcgcgcgaaaaatcaaataaacattcatttgtttttataaca

SEQ ID NO: 96 - DNA, 3768 bp, Unknown
  Description of Unknown: Human adenovirus 21 sequence
atgtctaatggtggcgcggctgagctagctcgactgcgacacctagaccactgccgccgctttcgctgtttcgcccgggaactcaccgagttcatttacttcgaactctccgaggagcaccctcagggtccggcccacggagtgcggattaccatcgaagggggaatagactctcgcctgcatcgcatcttctcccagcggcccgtgctgattgagcgcgaccagggaaatacaaccatctccatctactgcatctgtaaccaccccggattgcatgaaagcctttgctgtcttgtttgtgctgagtttaataaaaactgagttaagaccctcctacggactaccgcttcttcaatcaggactttacaacaccaaccagatcttccagaagacccagacccttcctcctctgatccaggactctaactctaccttaccagcaccctccactactaaccttcccgaaactaacaagcttggatctcatctgcaacaccgcctttcacgaagccttctttctgccaatactaccactcccaaaaccggaggtgagctccgcggtcttcctactgacgacccctgggtggtagcgggttttgtaacgttaggattagttgcgggtgggcttgtgctaatcctttgctacctatacacaccttgctgtgcatatttagtcatattgtgctgttggtttaagaaatgggggccatactagtcgtgcttgctttactttcgcttttgggtctgggctctgctaatctcaatcctcttgatcacgatccatgtctagacttcgacccagaaaattgcacacttacttttgcacccgacacaagccgtctctgtggagttcttattaagtgcggatgggactgcaggtccgttgaaattacacataataacaaaacatggaacaatacattatccaccacatgggaaccaggagttcccgagtggtatactgtctctgtccgaggtcctgacggttccattcgcattagtaacaacactttcattttttctgaaatgtgcgatctggccatgtttatgagcaaacagtatgacctatggcctcctagcaaagagaacattgtggcattttccattgcttattgcttggtaacatgcatcatcactgctatcatttgtgtgtgcatacacttgcttatagttattcgccctagacaaagcaatgaggaaaaagagaaaatgccttaacctttttcctcataccttttctttacagcatggcttctgttacagctctaattattgccagcattgtcactgtcgctcacgggcaaacaattgtccatattaccttaggacataatcacactcttgtagggcccccaattacttcagaggttatttggaccaaacttggaagtgttgattattttgatataatttgcaacaaaactgaaccaatatttgtaatctgtaacagacaaaatctcacgttaattaatgttagcaaaatttataacggttactattatggttatgatagatccagtagtcaatataaaaattacttagttcgcataactcagcccaaatcaacagtgccaactatgacaataattaaaatggctaataaagcattagaaaattttacattaccaacaacgcccaatgaaaaaaacattccaaattcaatgattgcaattattgcggcggtggcattgggaatggcactaataataatatgcatgttcctatatgcttgttgctataaaaagtttcaacataaacaggatccactactaaattttaacatttaattttttatacagatgatttccactacaatttttatcattactagccttgcagctgtaacttatggccgttcacacctaactgtacctgttggctcaacatgtacactacaaggaccccaagaaggctatgtcacttggtggagaatatatgataatggagggttcgctagaccatgtgatcagcctggtacaaaattttcatgcaacggaagagacttgaccattattaacataacattaaatgagcaaggcttctattatggaaccaactataaaaatagtttagattacaacattattgtagtgccagccaccacttctgctccccgcaaatccactttctctagcagcagtgccaaagcaagcacaattcctaaaacagcttctgctatgttaaagcttcgaaaaatcgctttaagtaattccacagcagctcccaatacaattcctaaatcaacaattggcatcattactgccgtggtagtgggattaatgattatatttttgtgcataatgtactacgcctgctgctatagaaaacatgaacaaaaaggtgatgcattactaaattttgatattgtttcaatcaaatgccactaacactctcaatgtgcagactactttaaaacatgacatggaaaaccacactacctcctatgcatacacaaatattcagcctaaatacgctatgcaacttagaaatcaccatactaattgtaattggaattcttacactatctgttattctttattttatattctgccgtcaaatacccaatgttcatagaaattctaaaagacgtcccatctattctcctatgattagtcgtccccatatggctctgaatgaaatctaagatctttttttttcttttacagtatggtgaacatcaatcatgattcctagaaatttcttcttcaccatactcatctgtgctttcaatgtctgtgctactttcacagcagtagccactgcaagcccagactgtataggaccatttgcttcctatgcactttttgcctttgttacttgcatctgcgtgtgtagcatagtctgcctggttattaattttttccaactggtagactggatctttgtgcgaattgcctacctacgtcaccatcccgaataccgcaatcaaaatgttgcggcacttcttaggcttatttaaaaccatgcaggctatgctaccagttattttaattctgctactaccctgcattgccctaccttccaccgccactcgcgctacacctgaacaacttagaaaatgcaaatttcaacaaccatggtcatttcttgattgctaccatgaaaaatctgattttcccacatactggatagtgattgttggaataattaacatactttcatgtaccgttttctcaatcacaatataccccacatttaattttgggtggaattctcccaatgcactgggttacccacaagaactagatgaacatatcccactacaacacatacaacaaccactagcattggtagagtatgaaaatgagccacaaccttcactgcctcctgctattagttacttcaacctaaccggcggagatgactgaaatactcaccacctccaattccgccgaggatctgcttgatatggacggccgcgcctcagaacagcgactcgcccaactacgcatccgccagcagcaggaacgcgtgaccaaagagctcagagatgtcatccaaattcaccaatgcaaaaaaggcatattttgtttggtaaaacaagccaagatatcctacgagatcaccgctactgaccatcgcctttcttacgaacttggcccccaacgacaaaaatttacatgcatggtgggaatcaaccctatagttatcacccagcaaagtggagatactaagggttgcattcactgctcttgcgattccaccgagtgcacctacaccctgctgaagaccctatgcggcctaagagacctgctacccatgaattaa

SEQ ID NO: 97 - DNA, 972 bp, Unknown
  Description of Unknown: Human adenovirus 21 sequence
atgaccaagagagtccggctcagtgattccttcaaccctgtctacccctatgaagatgaaagcacctcccaacacccctttataaacccagggtttatttccccaaatggctttacacaaagcccagacggagttcttactttaaattgtttaaccccactaacaaccacaggcgggcctttacagttaaaagtgggagggggacttatagtggatgacactgatgggaccttacaagaaaacatacgtgctacagcacccattactaaaaataatcattctgtagaactatccattggaaatggattagaaacacaaaacaataaactatgtgccaaattgggaaatgggttaaaatttaacaacggtgacatttgtataaaggatagtattaacaccttatggactggaataaagcctccacctaactgtcaaattgtggaaaacactgatacaaacgatggcaaacttactttagtattagtaaaaaacggagggcttgttaatggctacgtatctctagttggtgtatcagacactgtgaaccaaatgttcacacaaaagtcagcaaccatacaattaagattatatttcgactcttctggaaatctattaactgatgaatcaaacttaaaaattccacttaaaaataaatcttctacagcaaccagtgaagctgcaaccagcagcaaagcctttatgccaagtactacagcttatccctttaacaccactactagggatagtgaaaactatattcatggaatatgttactatatgactagttatgatagaagtctagttcccttaaacatttctataatgctaaacagccgtacgatttcttccaatgttgcctatgccatacaatttgaatggaatctaaatgcaaaagaatctccagaaagcaacatagctacgctgaccacatccccctttttcttttcttatattagagaagacgacaactaa

SEQ ID NO: 98 - DNA, 126 bp, Unknown; identical to SEQ ID NO: 26
  Description of Unknown: Human adenovirus 21 sequence

SEQ ID NO: 99 - DNA, 273 bp, Unknown
  Description of Unknown: Human adenovirus 21 sequence
gacggagttcttactttaaattgtttaaccccactaacaaccacaggcgggcctttacagttaaaagtgggagggggacttatagtggatgacactgatgggaccttacaagaaaacatacgtgctacagcacccattactaaaaataatcattctgtagaactatccattggaaatggattagaaacacaaaacaataaactatgtgccaaattgggaaatgggttaaaatttaacaacggtgacatttgtataaaggatagtattaacacc

SEQ ID NO: 100 - DNA, 570 bp, Unknown
  Description of Unknown: Human adenovirus 21 sequence
ttatggactggaataaagcctccacctaactgtcaaattgtggaaaacactgatacaaacgatggcaaacttactttagtattagtaaaaaacggagggcttgttaatggctacgtatctctagttggtgtatcagacactgtgaaccaaatgttcacacaaaagtcagcaaccatacaattaagattatatttcgactcttctggaaatctattaactgatgaatcaaacttaaaaattccacttaaaaataaatcttctacagcaaccagtgaagctgcaaccagcagcaaagcctttatgccaagtactacagcttatccctttaacaccactactagggatagtgaaaactatattcatggaatatgttactatatgactagttatgatagaagtctagttcccttaaacatttctataatgctaaacagccgtacgatttcttccaatgttgcctatgccatacaatttgaatggaatctaaatgcaaaagaatctccagaaagcaacatagctacgctgaccacatccccctttttcttttcttatattagagaagacgacaac

SEQ ID NO: 101 - DNA, 1686 bp, Unknown
  Description of Unknown: Human adenovirus 21 sequence
atgatgaggcgaaccgtgctaggcggagcggtggtgtatccggagggtcctcctccttcgtacgagagcgtgatgcagcaggcggcggcggcgacgatgcagccaccactggaggctccctttgtaccccctcggtacctggcacctacggaggggagaaacagcattcgttactcggagctggcaccattgtatgataccacccggttgtatttggtggacaacaagtccgcggacatcgcctcactgaactatcagaacgaccacagcaacttcctcaccacggtggtgcaaaacaatgactttacccccacggaggccagcacccagaccatcaactttgacgagcggtcgcgatggggcggtcagctgaagactatcatgcacaccaacatgcccaacgtgaacgagtacatgtttagcaacaagttcaaagctcgggtgatggtgtctagaaaggctcctgaaggtgtcacagtagatgacaattatgatcacaagcaggatattttggaatatgagtggtttgagtttactctaccggaagggaatttctcagccacaatgaccattgacctaatgaacaatgccatcattgataattaccttgaagtgggcagacagaatggagtgttagagagtgacattggtgttaaatttgacaccaggaactttagactgggttgggatccggaaactaagttgattatgcctggggtttacacctatgaggcattccatcctgacattgtattgttgcctggttgcggagttgactttactgaaagtcgccttagtaacttgcttggtatcaggaaaagacacccattccaggagggttttaagatcttgtatgaggatcttgaagggggtaatatcccggccctgttggatgtagaagcctatgagaacagtaagaaagaacaagaagccaaaacagaagccgctaaagctgctgctattgctaaagccaacatagttgtcagcgaccctgtaagggtggctaatgcagaagaagtcagaggagacaactatacagcttcatctgttgcaactgacgaatcgctattggctgctgtggccgaaactacagagacaaaactcactattaaacctgtagaaaaagacagcaagagtagaagttacaatgtcttggaagataaagtgaatacagcctaccgcagctggtacctgtcctacaactatggtgaccctgaaaaaggagtccgttcctggacactgctcaccacctcggatgtcacctgtggagcagagcaggtgtactggtcgctcccagacatgatgcaggaccctgtcacattccgttccacgagacaagtcagcaactatccagtggtaggtgcagagctcatgccggtcttctcaaagagtttctacaacgagcaagccgtgtactcccagcagcttcgccagtccacctcgctcacgcacgtcttcaaccgcttccctgagaaccagatcctcatccgcccgccagcgcccaccattaccaccgtcagtgaaaacgttcctgctctcacagatcacgggaccctgccgttgcgcagcagtatccggggagtccagcgcgtgaccgttactgacgccagacgccgcacctgcccctacgtctacaaggccctgggcatagtcgcgccgcgcgtcctttcaagccgcactttctaa

SEQ ID NO: 102 - DNA, 2850 bp, Unknown
  Description of Unknown: Human adenovirus 21 sequence
atggccaccccatcgatgctgccccagtgggcatacatgcacatcgccggacaggatgcttcggagtacctgagtccgggtctggtgcagttcgcccgcgccacagacacctacttcaatctggggaacaagtttaggaaccccaccgtggcgcccacccatgatgtgaccaccgaccgcagtcagcggctgatgctgcgctttgtgcccgttgaccgggaagacaatacctacgcatacaaagttcgatacaccttggctgtgggcgacaacagagtgctggatatggccagcactttctttgacattcggggtgtgttggatagaggccctagcttcaagccatactctggcactgcttacaactcgttggcccctaagggcgctcccaatacatctcagtggattgctgaaggcgtaaaaaaagaagatgggggatctgacgaagaggaagagaaaaatctcaccacttacacttttggaaatgccccagtgaaagcagaaggtggtgatatcactaaagacaaaggtcttccaattggttcagaaattacagacggcgaagccaaaccaatttatgcagataaactataccaaccagaacctcaggtgggagatgaaacttggactgacacagatggaacaactgagaagtatggtggtagagctctaaagccagaaactaaaatgaaaccctgctatgggtcttttgctaaacccactaacgtcaaaggcggacaggcaaaacaaaaaactactgaacaaccgcaaaaccagcaggttgaatatgatattgacatgaacttttttgatgaagcgtcacagaaagcaaacttcagtccaaaaattgtgatgtatgcagaaaatgtagacttggaaaccccagacactcatgtggtgtacaaacctggtacttcagaagaaagttctcatgctaatctgggtcaacaatctatgcccaacagacccaactacattggctttagagataactttattggacttatgtactacaacagtactggcaacatgggagtgctggcaggtcaagcatcccaattgaatgcggtggttgacttgcaggacagaaacacagaactatcatatcaactactgcttgactctctgggtgacagaaccagatacttcagcatgtggaatcaagcagtcgatagctatgatcctgatgtgcgcattattgaaaatcatggggtggaagatgagcttcccaactactgctttccattggatggagtaggggtaccaataagtagttacaaaataattgaaccaaacggacagggtgcagattggaaagagcctgacataaatggaacaagtgaaattggacaaggaaatctctttgccatggaaattaacctccaagctaatctctggagaagttttctttattccaatgtggctctgtatctcccagactcctacaaatacaccccagccaatgtcactcttccaactaacaccaacacttatgactacatgaatgggcgggtggttcccccatccctggtggatacctacgtaaacattggcgccagatggtctttggatgccatggacaatgtcaacccctttaaccatcaccgcaacgctggcctgcgataccggtccatgcttttgggcaatggtcgttacgtgcctttccacattcaagtgcctcagaaattctttgctgtgaagaacctgctgcttctacccggttcttacacctacgagtggaacttcagaaaggatgtgaacatggtcctgcagagttcccttggtaatgatctccgggtcgatggtgccagcataagttttaccagcatcaatctctatgccaccttcttccccatggcccacaacactgcctccacccttgaagccatgctgcgcaatgacaccaatgatcaatcattcaatgactacctttctgctgccaacatgctctaccccatcccggccaacgctaccaacgttcccatctccattccctctcgcaactgggccgccttcagaggctggtccttcaccagactcaaaaccaaggagactccctctttgggatcagggttcgatccctactttgtttactctggttctataccctacctggatggtaccttctaccttaaccacactttcaagaaagtctccatcatgtttgactcttcagtgagctggcctggtaatgacagattgctaagtccaaatgagttcgaaatcaagcgcacagttgatggggaaggctacaatgtggcccaatgtaacatgaccaaagactggttcctggtccagatgcttgccaactacaacattggataccagggcttctacgttcctgagggttacaaggatcgcatgtactccttcttcagaaacttccagcccatgagtagacaggtggttgatgagattaactacaaagactataaagctgtcgccgtaccctaccagcataataactctggctttgtgggttacatggctcctaccatgcgtcagggtcaagcgtaccctgctaactacccataccccctaattggaaccactgcagtaaccagtgtcacccagaaaaaattcctgtgcgacaggaccatgtggcgcatcccattctctagcaacttcatgtccatgggtgcccttacagacctgggacagaacttgctgtatgccaactcggcccatgcgctggacatgacttttgaggtggatcccatggatgagcccaccctgctttatcttcttttcgaagtcttcgacgtggtcagagtgcaccagccacaccgcggcgtcatcgaggccgtctacctgcgcacaccgttctcggccggcaacgccaccacataa

SEQ ID NO: 103 - protein, 323 aa, Unknown
  Description of Unknown: Human adenovirus 21 sequence
MTKRVRLSDSFNPVYPYEDESTSQHPFINPGFISPNGFTQSPDGVLTLNCLTPLTTTGGPLQLKVGGGLIVDDTDGTLQENIRATAPITKNNHSVELSIGNGLETQNNKLCAKLGNGLKFNNGDICIKDSINTLWTGIKPPPNCQIVENTDTNDGKLTLVLVKNGGLVNGYVSLVGVSDTVNQMFTQKSATIQLRLYFDSSGNLLTDESNLKIPLKNKSSTATSEAATSSKAFMPSTTAYPFNTTTRDSENYIHGICYYMTSYDRSLVPLNISIMLNSRTISSNVAYAIQFEWNLNAKESPESNIATLTTSPFFFSYIREDDN

SEQ ID NO: 104 - protein, 91 aa, Unknown
  Description of Unknown: Human adenovirus 21 sequence
DGVLTLNCLTPLTTTGGPLQLKVGGGLIVDDTDGTLQENIRATAPITKNNHSVELSIGNGLETQNNKLCAKLGNGLKFNNGDICIKDSINT

SEQ ID NO: 105 - protein, 190 aa, Unknown
  Description of Unknown: Human adenovirus 21 sequence
LWTGIKPPPNCQIVENTDTNDGKLTLVLVKNGGLVNGYVSLVGVSDTVNQMFTQKSATIQLRLYFDSSGNLLTDESNLKIPLKNKSSTATSEAATSSKAFMPSTTAYPFNTTTRDSENYIHGICYYMTSYDRSLVPLNISIMLNSRTISSNVAYAIQFEWNLNAKESPESNIATLTTSPFFFSYIREDDN

SEQ ID NO: 106 - protein, 561 aa, Unknown
  Description of Unknown: Human adenovirus 21 sequence
MMRRTVLGGAVVYPEGPPPSYESVMQQAAAATMQPPLEAPFVPPRYLAPTEGRNSIRYSELAPLYDTTRLYLVDNKSADIASLNYQNDHSNFLTTVVQNNDFTPTEASTQTINFDERSRWGGQLKTIMHTNMPNVNEYMFSNKFKARVMVSRKAPEGVTVDDNYDHKQDILEYEWFEFTLPEGNFSATMTIDLMNNAIIDNYLEVGRQNGVLESDIGVKFDTRNFRLGWDPETKLIMPGVYTYEAFHPDIVLLPGCGVDFTESRLSNLLGIRKRHPFQEGFKILYEDLEGGNIPALLDVEAYENSKKEQEAKTEAAKAAAIAKANIVVSDPVRVANAEEVRGDNYTASSVATDESLLAAVAETTETKLTIKPVEKDSKSRSYNVLEDKVNTAYRSWYLSYNYGDPEKGVRSWTLLTTSDVTCGAEQVYWSLPDMMQDPVTFRSTRQVSNYPVVGAELMPVFSKSFYNEQAVYSQQLRQSTSLTHVFNRFPENQILIRPPAPTITTVSENVPALTDHGTLPLRSSIRGVQRVTVTDARRRTCPYVYKALGIVAPRVLSSRTF

SEQ ID NO: 107 - protein, 949 aa, Unknown
  Description of Unknown: Human adenovirus 21 sequence
MATPSMLPQWAYMHIAGQDASEYLSPGLVQFARATDTYFNLGNKFRNPTVAPTHDVTTDRSQRLMLRFVPVDREDNTYAYKVRYTLAVGDNRVLDMASTFFDIRGVLDRGPSFKPYSGTAYNSLAPKGAPNTSQWIAEGVKKEDGGSDEEEEKNLTTYTFGNAPVKAEGGDITKDKGLPIGSEITDGEAKPIYADKLYQPEPQVGDETWTDTDGTTEKYGGRALKPETKMKPCYGSFAKPTNVKGGQAKQKTTEQPQNQQVEYDIDMNFFDEASQKANFSPKIVMYAENVDLETPDTHVVYKPGTSEESSHANLGQQSMPNRPNYIGFRDNFIGLMYYNSTGNMGVLAGQASQLNAVVDLQDRNTELSYQLLLDSLGDRTRYFSMWNQAVDSYDPDVRIIENHGVEDELPNYCFPLDGVGVPISSYKIIEPNGQGADWKEPDINGTSEIGQGNLFAMEINLQANLWRSFLYSNVALYLPDSYKYTPANVTLPTNTNTYDYMNGRVVPPSLVDTYVNIGARWSLDAMDNVNPFNHHRNAGLRYRSMLLGNGRYVPFHIQVPQKFFAVKNLLLLPGSYTYEWNFRKDVNMVLQSSLGNDLRVDGASISFTSINLYATFFPMAHNTASTLEAMLRNDTNDQSFNDYLSAANMLYPIPANATNVPISIPSRNWAAFRGWSFTRLKTKETPSLGSGFDPYFVYSGSIPYLDGTFYLNHTFKKVSIMFDSSVSWPGNDRLLSPNEFEIKRTVDGEGYNVAQCNMTKDWFLVQMLANYNIGYQGFYVPEGYKDRMYSFFRNFQPMSRQVVDEINYKDYKAVAVPYQHNNSGFVGYMAPTMRQGQAYPANYPYPLIGTTAVTSVTQKKFLCDRTMWRIPFSSNFMSMGALTDLGQNLLYANSAHALDMTFEVDPMDEPTLLYLLFEVFDVVRVHQPHRGVIEAVYLRTPFSAGNATT

SEQ ID NO: 108 - protein, 42 aa, Unknown; identical to SEQ ID NO: 36
  Description of Unknown: Human adenovirus 21 sequence

SEQ ID NO: 109 - DNA, 137 bp, Unknown
  Description of Unknown: Human adenovirus 34 sequence
catcatcaataatataccttatagatggaatggtgccaatatgtaaatgaggtgattttaaaaattgtggggtgtgtggtgattggctgtggggttaacggctaaacggggcggcgcggccgtgggaaaatgacgtt

SEQ ID NO: 110 - DNA, 137 bp, Unknown
  Description of Unknown: Human adenovirus 34 sequence
aacgtcattttcccacggccgcgccgccccgtttagccgttaaccccacagccaatcaccacacaccccacaatttttaaaatcacctcatttacatattggcaccattccatctataaggtatattattgatgatg

SEQ ID NO: 111 - DNA, 342 bp, Unknown
  Description of Unknown: Human adenovirus 34 sequence
ttgtgggggtggagtttttttgcaagttgtcgcgggaaatgtgacgcataaaaaggctttttttctcacggaactactgacttttcccacggtatttaacaggaaatgaggtagttttgaccggatgcaagtgaaaattgctgatttgcgcgcgaaaactgaatgaggaagtgtttttctgaataatgtggtatttatggcagggtggagtatttgttcagggccaggtagactttgacccattacgtggaggtttcgattaccgtgttttttacctgaatttccgcgtaccgtgtcaaagtcttctgtttttacgtaggtgtcagctgatcgctacggtat

SEQ ID NO: 112 - DNA, 3450 bp, Unknown
  Description of Unknown: Human adenovirus 34 sequence
ttatacctcagggtttgtgtcaagaggccactcttgagtgccagcgagaagagttttctcctctgcgccggcagtttaataataaaaaaatgagagatttgcgatttctgcctcaggaaataatttctgctgagactggaaatgaaatactggagcttgtggtgcacgccctgatgggagacgatccggagccacctgtgcagctttttgagcctcctacgcttcaggaactgtatgatttagaggtagagggatcggaggattctaatgaggaagctgtgaatggcttttttaccgattctatgcttttagctgctaatgaaggattagaattagatccgcctttggacactttcgatactccaggggtgattgtggaaagcggtacaggtgtaagaaaattacctgatttgggttccgtggactgtgatttgcactgctatgaagacgggtttcctccgagtgatgaggaggaccatgaaaaggagcagtctatgcagactgcagcgggtgagggagtgaaggctgccagtgttggttttcagttggattgcccggagcttcctggacatggctgtaagtcttgtgaatttcacaggaaaaatactggagtaaaggaactgttatgttcgctttgttatatgagagcgcactgccactttatttacagtaagtgtgtttaagttaaaatttaaaggaatatgctgtttttcacatgtatattgagtgggagttttgtgcttcttattataggtcctgtgtctgatgctgatgagtcaccatctcctgattctactacctcacctcctgagattcaagcacctgttcctgtggacgtgcgcaagcccattcctgtgaagcttaagcctgggaaacgtccagcagtggaaaaacttgaggacttgttacagggtggggacggacctttggacttgagtacacggaaacggccaagacaataagtgttccatatccgtgtttacttaaggtgacgtcaatatttgtgtgagagtgcaatgtaataaaaatatgttaactgttcactggtttttattgctttttgggcggggactcaggtatataagtagaagcagacctgtatggttagctcataggagctggctttcatccatggaggtttgggccattttggaagaccttagaaagactaggcaactgttagaggacgcttcggacggagtctccggtttttggagattctggttcgctagtgaattagctagggtagtttttaggataaaacaggactataaagaagaatttgaaaagttgttggtagattgcccaggactttttgaagctcttaatttgggccatcaagttcactttaaagaaaaagttttatcagttttagacttttcaaccccaggtagaactgccgctgctgtggcttttcttacttttatattagataaatggatcccgcagactcatttcagcaggggatacgttttggatttcgtagccacagcattgtggagaacatggaaggttcgcaagatgaggacaatcttaggttactggccagtgcagcctttgggtgtagcgggaatcctgaggcatccaccggtcatgccagcggttctggaggaggaacagcaagaggacaacccgagagccggcctggaccctccagtggaggaggcggagtagctgacttgtctcctgaactgcaacgggtgcttactggatctacgtccactggacgggataggggcgttaagagggagagggcatctagtggtactgatgctagatctgagttggctttaagtttaatgagtcgcagacgtcctgaaaccatttggtggcatgaggtccagaaagagggaagggatgaagtttctgtattgcaggagaaatattcactggaacaggtgaaaacatgttggttggagcctgaggatgattgggaggtggccattaaaaattatgccaagatagctttgaggcctgataaacagtataagattactagacggattaatatccggaatgcttgttacatatctggaaatggggctgaggtggtaatagatactcaagacaaggcagttattagatgctgcatgatggatatgtggcctggagtagtcggtatggaagcagtaacttttgtaaatgttaagtttaggggagatggttataatggaatagtgtttatggccaataccaaacttatattgcatggttgtagcttttttggtttcaacaatacctgtgtagatgcctggggacaggttagtgtacggggatgtagtttctatgcgtgttggattgccacagctggcagaaccaagagtcaattgtctctgaagaaatgcatattccaaagatgtaacctgggcattctgaatgaaggcgaagcaagggtccgccactgcgcttctacagatactggatgttttattttaattaagggcaatgccagcgtaaagcataacatgatttgcggtgcttccgatgagaggccttatcaaatgctcacttgtgccggtgggcattgtaatatgctggctactgtgcatattgtttcccatcaacgcaaaaaatggcctgtttttgatcacaatgtgttgaccaagtgtaccatgcatgcaggtgggcgtagaggaatgtttatgccttaccagtgtaacatgaatcatgtgaaagtgttgttggaaccagatgccttttccagaatgagcctaacaggaatctttgacatgaacatgcaaatctggaagatcctgaggtatgatgatacgagatcgagggtgcgcgcatgcgaatgcggaggcaagcatgccaggttccagccggtgtgtgtagatgtgactgaagatctgagaccggatcatttggttattgcccgcactggagcagagttcggatccagtggagaagaaactgactaaggtgagtattgggaaaacttggggtggggttttcagatggacagattgagtaaaaatttgttttttctgtctttcagctgtcatgagtggaaacgcttcttttaaggggggagtcttcagcccttatctgacagggcgtctcccatcctgggcaggagttcgtcagaatgttatgggatctactgtggatggaagacccgtccaacccgccaattcttcaacgctgacctatgctactttaagttcttcacctttggacgcagctgcagccgccgccgccgcctctgttgccgctaacactgtgcttggaatgggttactatggaagtatcgtggctaattccacttcctctaataacccttctaccctgactcaggacaagttacttgtccttttggcccagctggaggctttgacccaacgtctgggtgaactttatcagcaggtggccgagttgcgagtacaaactgagtctgctgtcggcacggcaaagtctaaataaaaaaaaattccacaatcaatgaataaa

SEQ ID NO: 113 - DNA, 19455 bp, Unknown
  Description of Unknown: Human adenovirus 34 sequence
atggccagccgcgaaggaaatcagttaagcgaccgccacagggagcacacccccgaacgcggaaggggttctgccagtcatccgccttccaggtcggaccgcagcccttcgcaatcgcctccacctctgcccccgaagagaaacacctgtcgccgtgtggggtcaggttcttctaccgacagtcagttggtaatggtgagcgaaacgtcacaatcctccctgtctccggaacggagcgacagtcctcctcctccgatacccccgaaaaagaagccaaggaagaccaaacatgtccccatgcaagacatcagtcaagacagcgaagaagaaagagaagaggcgcaacttgtagcagtgggtttcagctacccgcccgtgcgcatcgttgagaaggatggcaaaagaagcattgagaagatcgccaaagatgaccctctggctaaaggagctgctgcctgcactgttaagaatccgattagcttgcccctggtgtctgcttgggagaaaggcatggaagtgatgtgtctgctgatggagaagtacaggctggataacgaacttagaacctcttttaaactaatgcctgagcagcacgaacaatacaagcgcatctgtcaccagtacgtgaacgaggagcaccgaggcatccagttaactttcactagtcacaagacactgagcacgatgatgggaagatttctgcagggaatgatacattctttttctcagatcgcccaccataattgggaatgtacaggctgtgcgttgtggcctcatggctgcaatgattatgagggcaagctgaagtgcttgcatggcaatattatgattcagaaggagcagattatcgagatggatgtggccagcgagaacggacaacgagccttgaaggagaatcccgagcgaaccaaaatcacccaaaaccgctggggcagaagtgtggtgcaaatagccaacaatgacgcccgctgctgtgtgaatgatgccggctgcgcagctaaccagttttcgagcaggtcctgcgggatgttttataccgagggtagtaaagcccagcaggctttcaagcaatatgatgctttcatgagagccgtgtatccaggaatcagacaggatcaggccaagatgatactgatccccctgcactgcgattgtaaccacaagcctaattgggtgcccgccatgggtaggcagacctgcaagatgaccccgttcagcattgccaatgctgaagatctggatgtgggcatgattgcagatcccaccgtgctggcaagcgtaagacatccgtcgctgatggtgtttcagtgctgcaatccggtgtaccgcaactctcgcgctcagagcactggtcctaattgtgatttcaagatttcggctcctgacctgctgggagctttgcagctgaccagaaagctgtggagtgacatcctgcccgatataccggttcccaagttggtgattcccgaattcaagtggcaacccaagtatcagttccgcaacgtatcactgcctgcgggtcattctgattctcgtcagaacccattcgacttgtaaataaataagtaatccagagcctcgatacatgtaaaaaataaagtgctgtttattgaacacgttgtttacatgaatcattattgcacatccatacggtcgaacgcagtggccctttcgatgtgtgtacgatgagagcgaaaataaggcgaatgggtattgagaaaatggtagagtgctttttgattgtcacacagggtgggctggactttaggagaatgaagcatgttgtttggcactccagttagcaatttcatggtggggtttccgtccatgggacggtcaggccagtgcacaaaggcatgaaggaacatgcagcagaaaagtccgcaggcggcagaacgggggccctgcacggtctgggtagatttttccagcgtaatacaccggtccttggtagcaagagcgctgcggcgcaggagaccctcatattcaaactggtaaatctgtttgagacgatcatccgagaatccaaaaggatcaaaaaggtagcaggtgttagaacgtgggttccaaccgaaagccaaccagtgctctccccccgtctcacgtccggccgtatttacaatggcacaggcgagcttatcgggggccatgaaccccgggaagcgcttatcaaaggttcccaaaaaatatggtccgcaacccaggtcttggacaatggctctgagctcttgctcgctggagccgttttgggatccgcaggccatggttgcagctgctgtttgcaagaagcaagaagcttcttacgtggtagcgttaccggccgagaacggtgtacgcaggtagactgcctcgatgatgccgcggtgtggctgatgcactctgaccacgtcgaaaacttcgaagagaagataaagcagggtgggctcatccatgggatccacctcaaaggtcatgtccagagcatgagctgagttggcatagagcatgttctgtcccaagtctgtaagggctcccatagacatgaagttgcttgagaacggtatgcgccacatggttctgtcacacaagaactttttctgcgtaacactatttacggcagttgttccaatgagtggatagggatagttagcgggatagggttgaccttgacgcatggtcggagccatgtaacccacaaagccagagttgttgtgttggtagggtatggcgacggccttgaagtctttgtaattgacctcatcaaccacctgcctgctcatgggctggaagtttctgaaaaatgaatacatgcgatctttgtatccttctggaatgtagaagccctgatagccgatgttgtagttggcgagcatctgtaccaagaaccagtctttggtcatgttgcattgggctacgttgtagccttcgccatccacagtgcgctttatttcaaattcgttaggagatagtaacctgtcatttccaggccagctcactgaagagtcaaacatgatggaaaccttcttaaaagtgtggttcaggtagaaggtaccatccaggtagggaatagaaccagaatagacgaagtaggggtcaaatccagaccccaaagagggagtttctttggttttcagtctggtaaatgaccagcctctgaaagccgcccagttgcgagaaggaatggaaatgggaatattggttgcattggcaggaatggggtagagcatgttagctgcagataggtagtcgttgaatgactgatcattggtgtcattccgcagcatggcttcaagggtggaagcggtgttgtgagccatggggaaaaaagtagcatagaggttgatgctcgtaaaactgatgctggcgccatctacccgtaggtcgttaccgagggaactctgtagaaccatgtttacatccttcctaaagttccactcataagtgtaggagcctgggagaagcagcaggtttttaacagcgaagaatttttgaggcacttgtatgtggaaaggcacataacgtccgttacccagaagcatggatcggtaacgcaagccagcgttacggtggtggttgaatgggttgacattgtccatggcatccagagaccacctggcaccaatgttcacataggtgtctactagagatggcggcaccacccgcccgttcatgtagtcgtaggtgtttttgttttctggaagagtgacattggacggggtgtatttgtacgagtctgggagatatagagccacattggaataaaggaaacttcgccatagattggcttgaaggttaatttccatggcaaatggatttcccttagcaagttcactgctgccagttgggtctacatttgtccaagtagattggtctccatttggcttaatctccttgtaactatctgttcgcggaccgacaccatccaacggaaaacaatagttgggaagttcatcttccacaccatgattttcaataacacgtacatcaggatcataactgtccacagcctgattccacatgctaaagtatctggttctgtcgcccagagagtcaagcaagagttggtaagacagttctgtgtttctgtcctgcaagtcaaccactgcattcaactgagacgcttggccagccagtacccccatgttgccagtactgttatagtacataagtccgatgaagttatctctgaagccaatgtagttgggtctgttgggcatagactgttgtccaagattggtctcagaactagcatctgaaactccaggtttgtacacaacatgagtatctggacattccaggtccacattttctgcatacattacaattttaggtttgagttctgatctttgtgatcttaagtcaaagaagttcatgtcaatgtcatactcgatgttgttagtgccatcgtcttcttttggttttacctttgcctgacctcctttaatattagtaggtttagcaaaagatccgtagcagggtttcattttagtttcaggtttaagaaccctccctccatactcttcggtttttccgtctaggtcagtccaagtttcgtctcccacttgaggttctggctgataaagcttatcagcatagattggtttaggaccttcagttgaaacttccaagcccaccggcaatccgtcttttgtgatttcagcctcggcttttactggagcattaccaaaagtgtatgttgcttttttggcttcttccccatcatcagtattgccgtcgtccactaggccagtgcttgtaactcccttatccaaccactgagatgcatttggagcgcctttaggagccagggagttgtaagccgtaccagaatagggtttaaaactgggacctctgtccaacacgcccctaatgtcaaagaacgtgctggccatatccagcactctgttgtcgcccacggccagggtgtaccgcactttgtaagagtatgtattgtcctcccggtcaacgggcacgaagcgcaacatgagccgctggctacgatcggtggtcacatcgtgggtcggcgctacggtaggatttctaaacttatttcccagattgaagtaggtgtctgtggcgcgggcgaactgcaccagacccggactcaggtactccgaagcatcctgtccggcgatgtgcatgtatgcccattggggcagcatcgatggggtggccatcttgaaagtaactcagcgtcgacgcacgacctcttccttttttcctctgatgctgtgacggcgtgtaatgacacatatacacagataggcaagttaagcgctactccatatttaattaaaagcagcgacggcgttttacactttgcacgcctagacccacgatgctgttcagagtattttgccagtgtgcatttggacgaggagcgcccccgggacgtgacctggctacggcgactggtttcggggcagcgacaggcttagaagcgggtacagcagtagcagcaggaggagggggcaaatccaaggtgacgggtcgatgcaactgagaaggtttcatcaccccggtggccataggggctatcggtctagtggtgggcattccaagcttcgttgcttcctcataagaaggcggttcatctacgcgcgtcaccagcgtctcttccaaatcgggacgcggacgcttgtcgcctcgtttttctggcggaggaatttcttcctccacttgcatttcacctggggttgctggcggcgggtccaaacgactgtttatctttttctgcacagcctggttagccaaatctaccactccattgataccggaagctatcccatcgactactttttgttggaagttctggtctttaagtttatttctaagcgcctgtcctgtactgctgttccaagctttgttcccgtatgtttttatggttgagccaaaatttttaagcccgctccagatactgctccaattgaaggcgcccccgttcagttggctcgtgccgatgtcgctccaggtgcccatgtacggcttcgtgccgtgtcgcggagccaaggatgaaaaattgatgtcttccatctctaagaaaacatagtcacagtaccaggagtgtcagagtccattgtattttttatttatacgttttttttttttccaatgtcaatgtcgttgcgaggcctgaaccgccacggaagctatgcctggtattgcgccaatcgcagcagcgataattggaattaaggctggcaaaaaaccaccccgcaattgcttgcggatagcacgccgtcgcctgtagcgtcgcattccgcgccccaacatccctcttctacggcgcgagtttcttcctcggtaaccagtgatgggaacgcgaaggcgacaagtgagggccatatctgcaaggaggcagcggcaacattgattaagtgatgatactaggatggtaacgcgcacgcggcagtgtcaaaggttccgcactaccattgcggtacacttgccgcaccagggcgccgggaatcggtttgcttgtgcgtctacggcgacgactgcgatttgcaggtgtcttgcggcgacggcgggaagtactgtttcggctgcgatagtagcgagtgcctcggtaaccaggagtaggaataatagatgggtgtacgacatagttgggcatcaacagacttgctggaccgtactttcgtcgggatcttcgagtgggaccgacggcgtcagttgtaataggcatgggcatccatgggtccgtttgcacttcagtggaggtggcagtaggctttgcgggttcagtttgcacttccatactttcagtgggaattttaatgtctacagtttgtactcccagaccaggcgctacctgcttaatgggtctcactttaacctcaggttgaatatctggatccacttttactttctccaaaacgtcctccaacttctggcgtttgggcaccatcagttgcatagtgggatacaaatcttcaccttcgcgtttaacacctgttcgcggagttacgggtaacacttgctgcaaagtgaccggtttaagactaggggtgggatttccatgatccaagggtatggacactgtttcatccttgggatttattctactacgcttgccataagcaaactcgcctaatcggtcagctgcctgctcaagaatatcatcatccccgtacacctcatcataggaacgcttaaaagtagcgcttgaacgctcgccgggtgtaaagaccaccgaagttccaggtctcaacacatgtcgaactttgcgcccacgccattgcacgcgtcgccgtggggcaaactcgcgcacaaactccgccagcccatcatcgccatcttcctcttcttttttgtccttttttacccgcttgattttgcggggttttttttcatccttcaacggttggccgtagacttcaggtgcgataacctgcagcatttcttccttgtatttgcgcttggacatcctcgccgctgggacacaacatcggagactgctcagtatcttctaagtgcgagggggacgggtgcgcacgggtacacgttgaccggtggcagcgtcacgcacccagtatacattgcctcttcgcgattgggccatgtcggcaatagtcgccgctgcgacagcggctgcttgcctgcgggacctgccggcgctggcgcccgaagctgcacgtctggccgccctaagcatggctcttcgccccacgcgtctagctcttcgtagcagagctcttgctgctcgcatggcagtggtagctcggtgacgtctggcaatgcgccttcgccggctcttacgtcgagcatagttgcgagcgtcagccactacactgtcaataactgcgtccacagtagatgtaggcgcagtaggagtataattacgggcgtcggcaaccacctgatcgattacatcatcgacggtggttcgaacgcgagtgcggcccttgagggcaccccatggagcgcgaaaatgcccgcgaacacgcacgggatgttgggtagaacgtttgcgtgcgcctccgtacatcttgctgggagcgcgcagaccccaaccggtgttattactgggcgagataagaacggacattttttttttttttttagaaagtgcggcttgaaaggacgcgcggtgcgactatgcccagtgccttgtacacgtagggacaggtgcggcgtctggcgtcagtaacggtcacacgttggactccccggatactgctgcgcaacggcagggtcccgtgatctgtgagagcaggaacgttttcactgacggtggtaattgtgggcgccggcggacggattaaaatctggttctcaggaaagcggttgaagacgtgcgtaagcgaggtggactggcggagctgctgggagtacacagcttgttcgttgtagaagctctttgaaaagacgggcataagctctgcacccaccacagggtagttactgacttgtctagtggagcggaaagtgacaggatcctgcatcatgtctggaagcgaccagtagacctgctccgctccgcaggtgacatctgaggtggtgagcaatgtccaggaacgcactcctttttcggggtcgccataattgtacgaaaggtaccaactgcgataggccgtgttgattttatcttccaacacattgtaacttctgtttttgccatctttttccacaggcttaatagtgagttttaactctatgttttgagacacatcatccaataatgattctttagtcggaacggatgttgcggcaaaactgtctcccctgatttcactagcgttagccacccttaccggatcgttggcaactatgtttgctttagcttctgcagcagcttctattttggctttttgatctttcttgctgttctcataagcatctacatccaaaagggctggaatatttcctccttctaaatcctcatacaagatcttaaaaccctcttggaatgggtgtttctttctaatgccaagaaggttgctcagacggctttcggtaaagtccactccgcagccaggcagcaatacgatgtcaggatggaaggcctcataggtgtaaaccccaggcatgatcaacttagtttctggatcccatcccaacttgaagttcctagtgtcgaacttaacaccaatgtcactttccaacactccattctgtctgcccactttcaagtaattgtctatgatggcattgttcatcaagtcgatagtcatagtgaccgaaaagttgccttctggcaaagtaaactcgaaccactcgtattttagaatatcttgcttatgatcataattatcgtctactctaacaccctcaggaggttttctggacaccatcacacgcgctttgaacttgttactaaacatatactcgttcacgttgggcatgttagtatgcatgatggtttttagctgaccgccccaccgcgatcgttcatcaaagttaatggtctgggtgctggcttccgtaggggtaaagtcattgttttgcaccaccgtggtcaagaagttgctgtggtcattctgatagttcagagaagcaatgtccgccgacttgttgtccaccagatacaacctggtggtatcgtactgaggtgccagttccgagtaacgaatgctgtttctgccctccgtaggtgccaggtatcgcggaggcacaaagggagcctccagtggggattgcatcaccgccgtcgcctgctgctgctgcatcacgctctcgtacgaaggaggaggaccctccggatacaccaccgctccgcctagcacgactcgcctcattatactagacacagataataaagaagaacgaacgtacgctcgtcgccatggccttggtgagttttttcttttttatttttttttacaacataccacccaagcgagggcgcaaatgagcaaacgggttgccccttcctctcccacccaagtccaatacgctgctatcatcggccgaatcctcatcgtcccacacaagacccctctgtctgtcatggcgctggcgtctacggctcgctctacttgtagtccccatgatcccaggctcgtctctgtgatcctgagcataagtcttccatctactcattttatccaccaaactttctattccattgtttgggaaatttttttctcttgccggtctgagcaaggaatcgtttaggtactcctcttcgcccattaaactcgggcgacttattctacccacttcgctgctacgtacactgtgtagagaaaagggtagactaggaaaaggacttgcagactcgggctcagccgcggtagcaccaatgaccccggacagcgatgcagaagaatgcattctatcgccgccttcctttttccacgtgcgatgatcagaaagaggtgaaaaaacatcgctgtccacgtcgtcccacagaaatccgtcattagggtcgggcatgtcatattcgcccgtgtagaaaccaggtgggggcagccagtgcgggtttaagatggcattggtgaaataatcagagttcatagcggcagctctgtgcaagtagtccagcagtttgttaatgaaaggtcggttactggcatacatgctgggctccatatttcgcgctgtcatgtccagtgctgcagtcggagttgccccctcttgcatcagaaacaatcccacgctctgctgcacatatctaaggatcctctcctcctccgcagtaagagcatattgaggagggatcttttgagaccgattggtaagcaagaagttcagagtggcttccaaactgccagtgtcttcctgtcccaaagcgcgactgacttgggtaatttcttgataggtctgctcgtccacctgactttgccctatggcttcgcgatacaggtttagtaggtaacccaaataggaattacggtcgatgctaccgctgtcggtgaaaggagctaccaacagtaataataggcgggagttcggagttaacaagctagacacggttgctctttctcctaccggggcatgcactccccacaaacctttaaggtttttaaaagcttggctcagatttaccgtctgcaagccctgtctgctagtctgaaagaagtaatcaggaccggactgatatacttcgctctgaggtacttctgataccatcagtctcaaagcacttaaaaagttagtataatcctgttgaccacgcggcacattagcaggctgagtactcaagaaagcatttaacgccaccagcgaacccaggttggcatcgcgctggaacctttcgcgctgagacacggcttcgcgtacatctgttatcatacggtccaaattggtttgcacattgctactgttgtagcgagccacgcgttctaagagagcgttgtataccagtccggcctcatctggacgaatagctttgttctccaccaacgcgttcacgatggccaggaccttctcatgagtgggattagagcgggaaggcactacagcttccatgatggccgatagacggttggcctggggttgctgtctaaaggcttcggggttgcgagtcgtcaacgccatgatacgttgcatggcctgggtccaatcgtccgaggagttaatgccggacggctggctctgcagcgccgcccgcattgcgggatccggtgcttgctgttccatctagcaaaaaacacgggttgtgccatcagtcttccaagtactcgccctcttcctcctcgccttcatccgcctcttctatgtaaggaagctcacatcctgccgtcgcggcgttcagagccctgcgactaggctgccactgcaagtcagctcccatatcaaagtaattctcaccctcggttccagctccagttagagctctttgcaaactgtgcatcagttccctgtcgcttaactcgcgcctcctgctggcgctcaccgcgcgatgcattctgtcattgcggtacaccccaagatcatcgctcagggtcaacaccttcagcgtcatgcgcatgtagaacccatctatcttcacctccttgtctatgggaacgtatggagtcttgtagatcttgcgagcgtaatactttcccaagctcaaaaccgagtaattgatggcagccaccttctcggccaggcccaggctccgctcctgcactatgatactctgtagaatgttgataagatcatacaaccatctcccctcgggttcggtgatgttgagcagcgcctctctgaaagcctcattgtctctgctgtgttgcaccaccagaaacagctgtgcggtcagaggtttgctagtagggttctgaatgatagcttccatcaaatcccacaaatgcatcaaaccaagggtgacttcttcgcgggcaatgagggttcgcacatgattattaaaagacttttggaaattacgctcttcctttactgtctgttcgtaagccgatacaaggttggctgcagccacgtgtgccctggcaggactgatccctgtcacttcatcaacttcgaaatcctcgtcccgcaacactcgtcttctgtccaaaccgtgacgcagctcacgacccgcgttaaagcgggaagctcgcatctcctccggctcctcgccgcttctgtctctaaataggttctgttggggcacatacgcctcgcgagaatcttttttcagttgaactcgcggatgccgctcgggcgaaggcgcacctagacgtgccagtccttcgccctcttccaagtccagatcataggcgggctgtcccgcaccgctcacagcggcagttgcagtagttgcagggacagccttttgtggttgctgctgctgcgaggggggctgttgttggggacgcatctgtcgcagcacgggatgcatctgagcggcaaaaaaaaaaaataggactcacttccctgccattcggcaaccagcaaaacgactcgattccgtatcctggatttttgtaggctgggtcgagacgggagtgccaataccacgttagccgcggctccggccggctcgagtacaagtctcgaaccggggtacaccgcgacccaacccgttcacgttcctccaggctacggagtcgagtcgctgaacgctttcattttctccgtgtctatagagcatcaatgactgcgcgcgcctcactggtcaaaccgtgcctacaatgaactacttcatgccgctacgcaacatttggaaccgcgtacgcgagtttcctcgggcttctactaccgccgcaggaatcacctggatgtccaggtacatctacggctatcaccgccttatgttggaagacctcgcccccggcgctccagctacagaacgatggcctctctaccgccaaccaccgccgcattttcttataggttaccagtatctggtgcgcacctgcaacgattacatctttgacacccgcgcctattcgcgccttaaatacaccgagctcgtgcgccctggtcaccagacagttaactggtcagtcatggccaactgtgcttacaccattaataccggggcttaccaccgctttgtggattttgatgactttcaagccaccctcacccaagtacagcaagccatcctcgccgaaagagtcgtagctgacttggcactggtacaaccaatgcgcgggtttggactcacacgtatgcatggcagaacgggtgaggaagaagtgcccgtagaacggctcatgcaagactactacaaagatcttgctagatgtcaggataatgcttggggaatggccaatcgcctgcgtatccagcaagccggacccaaagacctggtgctcctcgccaccatccgccgtcttagaactgcctactttaatttcatcaccagcagcatcgtctcaccttcccgagatgaagaagaaacagaagacccagaccgaacacataaccacccccgcccacaagaagccgtactcagcctaccttgtgactgtgactggttagacgctttcgtcgaaaggttttcagatcccgtggatcttgacacgatcagatctctgcgcgcagtccctacgggccaattaataaaatgtataatcagcgccctctccctcccaaacggagaacctcccagtcaccactttaaggagatgcgcggcggtgtttttactctgcgaccgcgcgagaacggccgcgccgtcactgaaaccatgcgccgccgccgcggagaggtcattgaacgattcatcgaccgtttgcccgtgcgccgtcgacgtcgccgtgtgccccctccgcccccgcctgaagacgaagaagagatgttagtggaagaagagatagaagaggaagaagagatcccgggagccttcgaacgcgaagtacgggccaccatagccgaactcatccgtcttctcgaggaggaattgaccgtgtccgcgcgaaactcccagttttttaattttgccgtggacttctacgaggccatggagcgcttggaagctctgggcgatgtcagcgaaatgccgctgagacgatggatcatgtatttcttcgtcgccgaacacattgccaccacactcaactacctttttcagcgcctatgcaactatgcggtcttcaccagacacgtggagcttaacctcgctcaggtggtgatgcgcgcaagagactccgagggggccgtggtttacagccgcgtctggaacgaggcgggcatgactgcattctcccaactcatgggccgtatctccaatgacctcgcggccaccgtcgagagagcgggtcgcggagatcttcaggaggaagaaatcgagcagttcatggcggagatcgcctaccaggacaactctggtgacgtacaagaaatactgagacaagctgccgttaacgataccgaaattgattctgttgaactctctttcaggttcaagctcacggggccggtagctttcacccagagacgtcagatacaagacgtcaatcgacgcgtggtggcgcacgcaagtcttctcagagcgcagtaccagaacctgcccgtgcgcggcgccgacgtgccactaccagccatgcctccgggtccggaacaaccgcttccgcccggcgcgcgtccccgtcatcgcttctgagcatgcaagaagcaagagagccaccaccgatcaaaagaaaaaacaaaggtacggtagtggcgcccaaaggacacggaaccctgcaagccattgacatctctacaaacgaacctgtggaaatcaagtaccatctgaacctcccgcacgccctggaaaagatcatgcaagttaatcttctgtccctacctactaacctgagtccgcagcgtctcaggactctggacagctccagcctgcgcgctctggtccttcagctccgcccctcccgcgccgaggtctggacttgcctcccgcgggggctcgtcagcatgaccaccaccgaaacagaagatgaacaggccgatacagcgaatatagaagagcacgagatacaatcgccaggcctcggcttcccactgaaatttctcgtcaagggaagccaggtacagctcattcacgagatacaacccgtgcaacgctgcgactactgcggccgtctgtacaagcacaaacacgaatgctcggcgcgccgcagaaacttctacttccatcacatcaacagccaatcctccaactggtggcaggaaatccagttcttcccgatcggctctcatcctcgcacagaaagactcttcctgacctacgatgtggaaacttacacctggatggggtcctttggcaaacaactagttcctttcatgctggtcatgaaactctcaggagaagagcgtctcgtcaacatggcccacgatctagccattaaactaaagtgggatcgatggcaacaagaccccagaaccttctactgtgtcactccagaaaaaatggcaattggccagcattttcgtcagtatcgggaccagttacaaacagcactggcggtggatctttggtcatcattcctacatgcaaatcctcacctgcacgaatgggctctcgaacactacgccttatctgaccctacagacctaacctttgatgagctcaataagctacctcacgtcaaaggcacgccgcgtttcatagaattatacatcgtaggacacaacatcaacggtttcgacgagatcgtcctagctgcccaggtgatcaacaatcgagcggaagtaccacagcctttccgcatcactcgcaattttatgcccagagccggtaagattctcttcaacgatgttactttcgctttgcccaaccccgcctacaagaaacgggtagacttccaactctgggaacagggagcctgtgacgacatggacttcaaataccaatttctcaaagtcatggtcagagacaccttcgcccttactcacgcttcgctgcgaaaagctgctcaagcatactctctacccgtagagaagggctgctgcccttacaaggcagttaatcagttctacatgctaggatcttaccgtgcagacaaagacgggtttccgctagaagagtactggaaggatcgcgaagaataccttctcaaccgcgaactgtgggaaaagaaaaaccaaccaggttatgacatcattcaagaaacacttgactactgcgccctagacgtacttgtcaccgccgaactggtaaccaagcttcaagaatcttatgcccactttgtcagagactctgtaggtctacctcatgcccatttcaacatttttcaaagacccaccatctcttccaattctcacgccatctttcgccagattgtctacagaacagaaaaacccaatcgcaccaacttgggtccggggttgctagcgccatcacatgaactatatgactatgtgcgagcaagtatcagaggggggcgatgctatccaacctatataggcatctttgaggatcccatctacgtctatgacatctgtggcatgtatgcctctgcactcacccatcccatgccctggggcagtccccttaacccatatgagcgtgcactggcagctcgagaatggcaaatggccttagatgaccccactcccatcagctattttgataaggatttacttccgggaatctttaccatggatgcagaccctcccgatgaacttatgctagacccacttccccctttctgttctaggaaaggaggtaggctctgttggaccaacgaaccccttcgaggcgaggtggccaccagtgtggatttaattaccttgcataatcgagggtggcaagtgagaatcgtgccagatgaattgacaactatcttccccgaatggaagtgcctagcacgcgagtatgtccaactcaacatcgctgccaaagagcgcgcggacaaggaaaagaaccaaaccatgcgatccattgccaaacttttatccaacgccctgtatggatcatttgccaccaaacttgacaataaaaaaattgtgttttctgaccaaatggacgaaaacctcatgaaaggcatctcaaccggcactgtcaatatcaaatcctcctcgttcttagaaactgacaacctgagtgcagaggtcatgcccgccttcgagagggaatacctaccccaacagctgacgttcctggacagcgatccggaagacagtgaggaagagcaaagaaccgcccccttttatacccccccagcggggaccccaggtcacgtgaaatacacctacaagccaatcacattcctggatgttgaagagggtgacatgtgtttgcatactttggaaaaggtggaccccctggttgacaacgatcgctacccctcccacatagcctcctttgtgctggcctggacgcgcgcctttgtatcagagtggtcagagttcctgtacgaagaagaccgaggcactccactggagaagaggcctgtaaaatcagtctacggggatacggacagcctgtttgtcactcaacgaggacacgaactcatggagaccaaaggtaagaaacgcatcaaaaaatatggcggaaaacttgtttttgaccccaatgaaccggatttaacctggctggtggaatgtgaaactgtttgcgcctcctgcggcgcagatgcatactccccagaatccattttccttgcgcccaagctgtatgcgctgaaatgcctatactgcccggtatgcaagaaaacttccaaaggtaagctccgcgccaaaggccacgcagccgaggcgctcaactacgaactcatggtaaactgctacttggccgacatacagggcgccaagcgacagaagttctccaccagcagaatgagtctgaagcgcaccctggcaagcgcccaagcaggcgcacaccccttcactgtgacggaaacaaccctgactcgaacactgagaccctggaaggaccgaaccctggcagcgctggacgcccatcgtctcataccctactccaggagccgtccaaacccgcgaaacgaggaggtctgctggatcgagatgccatagaacacatcactgaactgtggaacagactagaacttttgcagcaaactctctccaaaatgcccatggctgacggtctaaaaccgctgaaaaacttttcctcactacaagaacttctatcactaggaggagagcgcctcctaatggatttggtgcgggaaaatatgcatgtaagggaaatgatgaacgaggtggcccccttgcttcgagaagacggcagttgccgttccctaaactaccacctgcaacctgtaatcggaatcatttatggccccaccggatgtggcaaatctcaattgctcagaaacttgctatcatcccaactaatcacccccgccccagaaacggtgttcttcatagccccccaggtggacatgattccaccatcggaactgaaagcttgggaaatgcaaatctgtgaggggaactatgctccggggcccgaaggaacattcataccccaatcgggtactctccgccccaaattcattaaaatggcttatgatgatttaactcaggaacataactatgatgtgtcagacccacggaacgtgtttgcccgcgctgctgcccacggccccattgctattatcatggatgagtgcatggaaaatctcggaggacacaagggtgtctccaaatttttccacgcttttccatccaagctacacgataaatttcctaaatgtaccggatacaccgtcttggtggtccttcataacatgaacccaagacgagatcttggcggcaatattgccaacttaaaaatccaatccaaaatgcacataatttcaccccgaatgcacccctcccagctcaaccggtttgtaaacacctacaccaagggcttatctgtggcaatcagcctacttctaaaagatattgtgcaacaccatgcactgcgaccttgttatgactgggtgatttacaacactaccccggagcatgaatcccttcaatggagctatctccaccccaaagatggcctaatgcccatgtatctaaacattcaatcccacctctataggattctggaaaaaatccaccgtgttctcaatgatcgagatcggtggtctagggcataccgtgcgcgaaaaatgaaataaaaacacttgattttaaatcaa

SEQ ID NO: 114 - DNA, 3441 bp, Unknown
  Description of Unknown: Human adenovirus 34 sequence
atgtctggtgacgcggctgagctatctcggctgcgacatctagaccactgccgccgctttcgctgctttgcccgggaactcattgagttcatctacttcgaactccccaaggatcaccctcaaggtccggcccacggagtgcggattactatcgaaggcaaaatacactctcgcctgcaacgaattttctcccagcggcccgtgctgatcgagcgagaccagggaaacaccacggtttccatctactgcatttgtaatcaccccggattgcatgaaagcctttgctgtcttatgtgtactgagtttaataaaaactgaattaagactctcctacggactgccgcttcttcaacccggattttacaaccagaagaacgaaacttttcctgtcgtccaggactctgttaacttcacctttcctactcacaaactagaagctcaacgactacaccgcttttccagaagcattttccctactaatactactttcaaaaccggaggtgagctccaaggtcttcctacagaaaacccttgggtggaagcgggccttgtagtgctaggaattcttgcgggtgggcttgtgattattctttgctacctatacacaccttgcttcactttcctagtggtgttgtggtattggtttaaaaaatggggcccatactagtcttgcttgttttactttcgcttttggaaccgggttctgccaattacgatccatgtctagacttcgacccagaaaactgcacacttacttttgcacccgacacaagccgcatctgtggagttcttattaagtgcggatgggaatgcaggtccgttgaaattacacacaataacaaaacctggaacaataccttatccaccacatgggagccaggagttcccgagtggtacactgtctctgtccgaggtcctgacggttccatccgcattagtaacaacactttcattttttctgaaatgtgcgatctggccatgttcatgagcaaacagtattctctatggcctcctagcaaggacaacatcgtaacgttctccattgcttattgcttgtgcgcttgccttcttactgctttactgtgcgtatgcatacacctgcttgtaaccactcgcatcaaaaacgccaataacaaagaaaaaatgccttaacctctttctgtttacagacatggcttctcttacatctctcatatttgtcagcattgtcactgccgctcacggacaaacagtcgtctctatccctctaggacataattacactctcataggacccccaatcacttcagaggtcatctggaccaaactgggaagcgttgattactttgatataatctgcaacaaaacaaaaccaataatagtaacttgcaacatacaaaatcttacattgattaatgttagcaaagtttacagcggttactattatggttatgacagatacagtagtcaatatagaaattacttggttcgtgttacccagttaaaaaccacgaaaatgccaaatatggcaaagattcgatccgatgacaattctctagaaacttttacatctcccaccacacccgacgaaaaaaacatcccagattcaatgattgcaattgttgcagcggtggcagtggtgatggcactaataataatatgcatgcttttatatgcttgtcgctacaaaaagtttcatcctaaaaaacaagatctcctactaaggcttaacatttaatttctttttatacagccatggtttccactaccacattccttatgcttactagtcttgcaactctgacttctgctcgctcacacctcactgtaactataggctcaaactgcacactaaaaggacctcaaggtggtcatgtcttttggtggagaatatatgacaatggatggtttacaaaaccatgtgaccaacctggtagatttttctgcaacggcagagacctaaccattatcaacgtgacagcaaatgacaaaggcttctattatggaaccgactataaaagtagtttagattataacattattgtactgccatctaccactccagcaccccgcacaactactttctctagcagcagtgtcgctaacaatacaatttccaatccaacctttgccgcgcttttaaaacgcactgtgaataattctacaacttcacatacaacaatttccacttcaacaatcagcattatcgctgcagtgacaattggaatatctattcttgtttttaccataacctactacgcctgctgctatagaaaagacaaacataaaggtgatccattacttagatttgatatttaatttgttctttttttttttatttacagtatggtgaacaccaatcatggtacctagaaatttcttcttcaccatactcatttgtgcatttaatgtttgcgctactttcacagcagtagccacagcaaccccagactgtataggagcatttgcttcctatgcactttttgcttttgttacttgcatctgcgtatgtagcatagtctgcctggttattaattttttccaacttctagactggatccttgtgcgaattgcctacctgcgccaccatcccgaataccgcaaccaaaatatcgcggcacttcttagactcatctaaaaccatgcaggctatactaccaatatttttgcttctattgcttccctacgctgtctcaaccccagctgcctatagtactccaccagaacaccttagaaaatgcaaattccaacaaccgtggtcatttcttgcttgctatcgagaaaaatcagaaattcccccaaatttaataatgattgctggaataattaatataatctgttgcaccataatttcatttttgatataccccctatttgattttggctggaatgctcccaatgcacatgatcatccacaagacccagaggaacacattcccctacaaaacatgcaacatccaatagcgctaatagattacgaaagtgaaccacaacccccactactccctgctattagttacttcaacctaaccggcggagatgactgaaacactcaccacctccaattccgccgaggatctgctcgatatggacggccgcgtctcagaacagcgacttgcccaactacgcatccgccagcagcaggaacgcgcggccaaagagctcagagatgtcatccaaattcaccaatgcaaaaaaggcatattctgtttggtaaaacaagccaagatatcctacgagatcaccgctactgaccatcgcctctcttacgaacttggcccccaacgacaaaaatttacctgcatggtgggaatcaaccccatagttatcacccagcaaagtggagatactaagggttgcattcactgctcctgcgattccatcgagtgcacctacaccctgctgaagaccctatgcggcctaagagacctgctaccaatgaattaaaaaatgattaataaa

SEQ ID NO: 115 - DNA, 972 bp, Unknown
  Description of Unknown: Human adenovirus 34 sequence
atgaccaagagagtccggctcagtgactccttcaaccctgtctacccctatgaagatgaaagcacctcccaacacccctttataaacccagggtttatttccccaaatggcttcacacaaagcccagacggagttcttactttaaaatgtttaaccccactaacaaccacaggcggatctctacagctaaaagtgggagggggacttacagtggatgacactgatggtaccttacaagaaaacatacgtgctacagcacccattactaaaaataatcactctgtagaactatccattggaaatggattagaaactcaaaacaataaactatgtgccaaattgggaaatgggttaaaatttaacaacggtgacatttgtataaaggatagtattaacaccttatggactggaataaaccctccacctaactgtcaaattgtggaaaacactaatacaaatgatggcaaacttactttagtattagtaaaaaacggagggcttgttaatggctacgtgtctctagttggtgtatcagacactgtgaaccaaatgttcacacaaaagacagcaaacatccaattaagattatattttgactcttctggaaatctattaactgatgaatcagacttaaaaattccacttaaaaataaatcttctacagcgaccagtgaaactgtagccagcagcaaagcctttatgccaagtactacagcttatcccttcaacaccactactagggatagtgaaaactacattcatggaatatgttactacatgactagttatgatagaagtctatttcccttgaacatttctataatgctaaacagccgtatgatttcttccaatgttgcctatgccatacaatttgaatggaatctaaatgcaagtgaatctccagaaagcaacatagctacgctgaccacatccccctttttcttttcttacattacagaagacgacaactaa

SEQ ID NO: 116 - DNA, 126 bp, Unknown; identical to SEQ ID NO: 44
  Description of Unknown: Human adenovirus 34 sequence

SEQ ID NO: 117 - DNA, 273 bp, Unknown
  Description of Unknown: Human adenovirus 34 sequence
gacggagttcttactttaaaatgtttaaccccactaacaaccacaggcggatctctacagctaaaagtgggagggggacttacagtggatgacactgatggtaccttacaagaaaacatacgtgctacagcacccattactaaaaataatcactctgtagaactatccattggaaatggattagaaactcaaaacaataaactatgtgccaaattgggaaatgggttaaaatttaacaacggtgacatttgtataaaggatagtattaacacc

SEQ ID NO: 118 - DNA, 570 bp, Unknown
  Description of Unknown: Human adenovirus 34 sequence
ttatggactggaataaaccctccacctaactgtcaaattgtggaaaacactaatacaaatgatggcaaacttactttagtattagtaaaaaacggagggcttgttaatggctacgtgtctctagttggtgtatcagacactgtgaaccaaatgttcacacaaaagacagcaaacatccaattaagattatattttgactcttctggaaatctattaactgatgaatcagacttaaaaattccacttaaaaataaatcttctacagcgaccagtgaaactgtagccagcagcaaagcctttatgccaagtactacagcttatcccttcaacaccactactagggatagtgaaaactacattcatggaatatgttactacatgactagttatgatagaagtctatttcccttgaacatttctataatgctaaacagccgtatgatttcttccaatgttgcctatgccatacaatttgaatggaatctaaatgcaagtgaatctccagaaagcaacatagctacgctgaccacatccccctttttcttttcttacattacagaagacgacaac

SEQ ID NO: 119 - DNA, 1677 bp, Unknown
  Description of Unknown: Human adenovirus 34 sequence
atgaggcgagtcgtgctaggcggagcggtggtgtatccggagggtcctcctccttcgtacgagagcgtgatgcagcagcagcaggcgacggcggtgatgcaatccccactggaggctccctttgtgcctccgcgatacctggcacctacggagggcagaaacagcattcgttactcggaactggcacctcagtacgataccaccaggttgtatctggtggacaacaagtcggcggacattgcttctctgaactatcagaatgaccacagcaacttcttgaccacggtggtgcaaaacaatgactttacccctacggaagccagcacccagaccattaactttgatgaacgatcgcggtggggcggtcagctaaaaaccatcatgcatactaacatgcccaacgtgaacgagtatatgtttagtaacaagttcaaagcgcgtgtgatggtgtccagaaaacctcctgagggtgttagagtagacgataattatgatcataagcaagatattctaaaatacgagtggttcgagtttactttgccagaaggcaacttttcggtcactatgactatcgacttgatgaacaatgccatcatagacaattacttgaaagtgggcagacagaatggagtgttggaaagtgacattggtgttaagttcgacactaggaacttcaagttgggatgggatccagaaactaagttgatcatgcctggggtttacacctatgaggccttccatcctgacatcgtattgctgcctggctgcggagtggactttaccgaaagccgtctgagcaaccttcttggcattagaaagaaacacccattccaagagggttttaagatcttgtatgaggatttagaaggaggaaatattccagcccttttggatgtagatgcttatgagaacagcaagaaagatcaaaaagccaaaatagaagctgctgcagaagctaaagcaaacatagttgccaacgatccggtaagggtggctaacgctagtgaaatcaggggagacagttttgccgcaacatccgttccgactaaagaatcattattggatgatgtgtctcaaaacatagagttaaaactcactattaagcctgtggaaaaagatggcaaaaacagaagttacaatgtgttggaagataaaatcaacacggcctatcgcagttggtacctttcgtacaattatggcgaccccgaaaaaggagtgcgttcctggacattgctcaccacctcagatgtcacctgcggagcggagcaggtctactggtcgcttccagacatgatgcaggatcctgtcactttccgctccactagacaagtcagtaactaccctgtggtgggtgcagagcttatgcccgtcttttcaaagagcttctacaacgaacaagctgtgtactcccagcagctccgccagtccacctcgcttacgcacgtcttcaaccgctttcctgagaaccagattttaatccgtccgccggcgcccacaattaccaccgtcagtgaaaacgttcctgctctcacagatcacgggaccctgccgttgcgcagcagtatccggggagtccaacgtgtgaccgttactgacgccagacgccgcacctgtccctacgtgtacaaggcactgggcatagtcgcaccgcgcgtcctttcaagccgcactttctaa

SEQ ID NO: 120 - DNA, 2856 bp, Unknown
  Description of Unknown: Human adenovirus 34 sequence
atggccaccccatcgatgctgccccaatgggcatacatgcacatcgccggacaggatgcttcggagtacctgagtccgggtctggtgcagttcgcccgcgccacagacacctacttcaatctgggaaataagtttagaaatcctaccgtagcgccgacccacgatgtgaccaccgatcgtagccagcggctcatgttgcgcttcgtgcccgttgaccgggaggacaatacatactcttacaaagtgcggtacaccctggccgtgggcgacaacagagtgctggatatggccagcacgttctttgacattaggggcgtgttggacagaggtcccagttttaaaccctattctggtacggcttacaactccctggctcctaaaggcgctccaaatgcatctcagtggttggataagggagttacaagcactggcctagtggacgacggcaatactgatgatggggaagaagccaaaaaagcaacatacacttttggtaatgctccagtaaaagccgaggctgaaatcacaaaagacggattgccggtgggcttggaagtttcaactgaaggtcctaaaccaatctatgctgataagctttatcagccagaacctcaagtgggagacgaaacttggactgacctagacggaaaaaccgaagagtatggagggagggttcttaaacctgaaactaaaatgaaaccctgctacggatcttttgctaaacctactaatattaaaggaggtcaggcaaaggtaaaaccaaaagaagacgatggcactaacaacatcgagtatgacattgacatgaacttctttgacttaagatcacaaagatcagaactcaaacctaaaattgtaatgtatgcagaaaatgtggacctggaatgtccagatactcatgttgtgtacaaacctggagtttcagatgctagttctgagaccaatcttggacaacagtctatgcccaacagacccaactacattggcttcagagataacttcatcggacttatgtactataacagtactggcaacatgggggtactggctggccaagcgtctcagttgaatgcagtggttgacttgcaggacagaaacacagaactgtcttaccaactcttgcttgactctctgggcgacagaaccagatactttagcatgtggaatcaggctgtggacagttatgatcctgatgtacgtgttattgaaaatcatggtgtggaagatgaacttcccaactattgttttccgttggatggtgtcggtccgcgaacagatagttacaaggagattaagccaaatggagaccaatctacttggacaaatgtagacccaactggcagcagtgaacttgctaagggaaatccatttgccatggaaattaaccttcaagccaatctatggcgaagtttcctttattccaatgtggctctatatctcccagactcgtacaaatacaccccgtccaatgtcactcttccagaaaacaaaaacacctacgactacatgaacgggcgggtggtgccgccatctctagtagacacctatgtgaacattggtgccaggtggtctctggatgccatggacaatgtcaacccattcaaccaccaccgtaacgctggcttgcgttaccgatccatgcttctgggtaacggacgttatgtgcctttccacatacaagtgcctcaaaaattcttcgctgttaaaaacctgctgcttctcccaggctcctacacttatgagtggaactttaggaaggatgtaaacatggttctacagagttccctcggtaacgacctacgggtagatggcgccagcatcagttttacgagcatcaacctctatgctacttttttccccatggctcacaacaccgcttccacccttgaagccatgctgcggaatgacaccaatgatcagtcattcaacgactacctatctgcagctaacatgctctaccccattcctgccaatgcaaccaatattcccatttccattccttctcgcaactgggcggctttcagaggctggtcatttaccagactgaaaaccaaagaaactccctctttggggtctggatttgacccctacttcgtctattctggttctattccctacctggatggtaccttctacctgaaccacacttttaagaaggtttccatcatgtttgactcttcagtgagctggcctggaaatgacaggttactatctcctaacgaatttgaaataaagcgcactgtggatggcgaaggctacaacgtagcccaatgcaacatgaccaaagactggttcttggtacagatgctcgccaactacaacatcggctatcagggcttctacattccagaaggatacaaagatcgcatgtattcatttttcagaaacttccagcccatgagcaggcaggtggttgatgaggtcaattacaaagacttcaaggccgtcgccataccctaccaacacaacaactctggctttgtgggttacatggctccgaccatgcgtcaaggtcaaccctatcccgctaactatccctatccactcattggaacaactgccgtaaatagtgttacgcagaaaaagttcttgtgtgacagaaccatgtggcgcataccgttctcaagcaacttcatgtctatgggagcccttacagacttgggacagaacatgctctatgccaactcagctcatgctctggacatgacctttgaggtggatcccatggatgagcccaccctgctttatcttctcttcgaagttttcgacgtggtcagagtgcatcagccacaccgcggcatcatcgaggcagtctacctgcgtacaccgttctcggccggtaacgctaccacgtaa

SEQ ID NO: 121 - protein, 323 aa, Unknown
  Description of Unknown: Human adenovirus 34 sequence
MTKRVRLSDSFNPVYPYEDESTSQHPFINPGFISPNGFTQSPDGVLTLKCLTPLTTTGGSLQLKVGGGLTVDDTDGTLQENIRATAPITKNNHSVELSIGNGLETQNNKLCAKLGNGLKFNNGDICIKDSINTLWTGINPPPNCQIVENTNTNDGKLTLVLVKNGGLVNGYVSLVGVSDTVNQMFTQKTANIQLRLYFDSSGNLLTDESDLKIPLKNKSSTATSETVASSKAFMPSTTAYPFNTTTRDSENYIHGICYYMTSYDRSLFPLNISIMLNSRMISSNVAYAIQFEWNLNASESPESNIATLTTSPFFFSYITEDDN

SEQ ID NO: 122 - protein, 91 aa, Unknown
  Description of Unknown: Human adenovirus 34 sequence
DGVLTLKCLTPLTTTGGSLQLKVGGGLTVDDTDGTLQENIRATAPITKNNHSVELSIGNGLETQNNKLCAKLGNGLKFNNGDICIKDSINT

SEQ ID NO: 123 - protein, 190 aa, Unknown
  Description of Unknown: Human adenovirus 34 sequence
LWTGINPPPNCQIVENTNTNDGKLTLVLVKNGGLVNGYVSLVGVSDTVNQMFTQKTANIQLRLYFDSSGNLLTDESDLKIPLKNKSSTATSETVASSKAFMPSTTAYPFNTTTRDSENYIHGICYYMTSYDRSLFPLNISIMLNSRMISSNVAYAIQFEWNLNASESPESNIATLTTSPFFFSYITEDDN

SEQ ID NO: 124 - protein, 558 aa, Unknown
  Description of Unknown: Human adenovirus 34 sequence
MRRVVLGGAVVYPEGPPPSYESVMQQQQATAVMQSPLEAPFVPPRYLAPTEGRNSIRYSELAPQYDTTRLYLVDNKSADIASLNYQNDHSNFLTTVVQNNDFTPTEASTQTINFDERSRWGGQLKTIMHTNMPNVNEYMFSNKFKARVMVSRKPPEGVRVDDNYDHKQDILKYEWFEFTLPEGNFSVTMTIDLMNNAIIDNYLKVGRQNGVLESDIGVKFDTRNFKLGWDPETKLIMPGVYTYEAFHPDIVLLPGCGVDFTESRLSNLLGIRKKHPFQEGFKILYEDLEGGNIPALLDVDAYENSKKDQKAKIEAAAEAKANIVANDPVRVANASEIRGDSFAATSVPTKESLLDDVSQNIELKLTIKPVEKDGKNRSYNVLEDKINTAYRSWYLSYNYGDPEKGVRSWTLLTTSDVTCGAEQVYWSLPDMMQDPVTFRSTRQVSNYPVVGAELMPVFSKSFYNEQAVYSQQLRQSTSLTHVFNRFPENQILIRPPAPTITTVSENVPALTDHGTLPLRSSIRGVQRVTVTDARRRTCPYVYKALGIVAPRVLSSRTF

SEQ ID NO: 125 - protein, 951 aa, Unknown
  Description of Unknown: Human adenovirus 34 sequence
MATPSMLPQWAYMHIAGQDASEYLSPGLVQFARATDTYFNLGNKFRNPTVAPTHDVTTDRSQRLMLRFVPVDREDNTYSYKVRYTLAVGDNRVLDMASTFFDIRGVLDRGPSFKPYSGTAYNSLAPKGAPNASQWLDKGVTSTGLVDDGNTDDGEEAKKATYTFGNAPVKAEAEITKDGLPVGLEVSTEGPKPIYADKLYQPEPQVGDETWTDLDGKTEEYGGRVLKPETKMKPCYGSFAKPTNIKGGQAKVKPKEDDGTNNIEYDIDMNFFDLRSQRSELKPKIVMYAENVDLECPDTHVVYKPGVSDASSETNLGQQSMPNRPNYIGFRDNFIGLMYYNSTGNMGVLAGQASQLNAVVDLQDRNTELSYQLLLDSLGDRTRYFSMWNQAVDSYDPDVRVIENHGVEDELPNYCFPLDGVGPRTDSYKEIKPNGDQSTWTNVDPTGSSELAKGNPFAMEINLQANLWRSFLYSNVALYLPDSYKYTPSNVTLPENKNTYDYMNGRVVPPSLVDTYVNIGARWSLDAMDNVNPFNHHRNAGLRYRSMLLGNGRYVPFHIQVPQKFFAVKNLLLLPGSYTYEWNFRKDVNMVLQSSLGNDLRVDGASISFTSINLYATFFPMAHNTASTLEAMLRNDTNDQSFNDYLSAANMLYPIPANATNIPISIPSRNWAAFRGWSFTRLKTKETPSLGSGFDPYFVYSGSIPYLDGTFYLNHTFKKVSIMFDSSVSWPGNDRLLSPNEFEIKRTVDGEGYNVAQCNMTKDWFLVQMLANYNIGYQGFYIPEGYKDRMYSFFRNFQPMSRQVVDEVNYKDFKAVAIPYQHNNSGFVGYMAPTMRQGQPYPANYPYPLIGTTAVNSVTQKKFLCDRTMWRIPFSSNFMSMGALTDLGQNMLYANSAHALDMTFEVDPMDEPTLLYLLFEVFDVVRVHQPHRGIIEAVYLRTPFSAGNATT

SEQ ID NO: 126 - protein, 42 aa, Unknown; identical to SEQ ID NO: 36
  Description of Unknown: Human adenovirus 34 sequence

SEQ ID NO: 127 - DNA, 159 bp, Unknown
  Description of Unknown: Human adenovirus D37 sequence
catcatcataatataccccacaaagtaaacaaaagttaatatgcaaatgagcttttgaattttaacggttttggggcggagccaacgctgattggacgagaagcggtgatgcaaataacgtcacgacgcacggctaacggccggcgcggaggcgtggcc

SEQ ID NO: 128 - DNA, 159 bp, Unknown
  Description of Unknown: Human adenovirus D37 sequence
ggccacgcctccgcgccggccgttagccgtgcgtcgtgacgttatttgcatcaccgcttctcgtccaatcagcgttggctccgccccaaaaccgttaaaattcaaaagctcatttgcatattaacttttgtttactttgtggggtatattatgatgatg

SEQ ID NO: 129 - DNA, 320 bp, Unknown
  Description of Unknown: Human adenovirus D37 sequence
taggccggaagcaagtcgcggggctaatgacgtataaaaaagcggactttagacccggaaacggccgattttcccgcggccacgcccggatatgaggtaattctgggcggatgcaagtgaaattaggtcattttggcgccaaaactgaatgaggaagtgaaaagtgaaaaatacctgtcccgcccagggcggaatatttaccgagggccgagagactttgaccgattacgtggggtttcgattgcggtgtttttttcgcgaatttccgcgtccgtgtgaaagtccggtgtttatgtcacagatcagctgatccacagggt

SEQ ID NO: 130 - DNA, 3388 bp, Unknown
  Description of Unknown: Human adenovirus D37 sequence
atttaaaccagttgagcccgtcaagaggccactcttgagtgccagcgagtagagatttctctgagctccgctcccaaagtgtgagaaaaatgagacacctgcgcctcctgtcttcaactgtgcctattaacatggccgcattattgctggaggactatgtgagtacagtattggaggacgaactacatccatctccatttgagctgggacctacacttcaggacctttatgatttggaggtagatgcccatgatgacgacccaaacgaagaggctgtgaatttaatatttccagaatctctgattcttcaggctgacatagccagcgaagctgtacctacaccacttcatacaccgactttgtcacccatacctgaattggaagaggaggacgagttagacctccgatgttatgaggaaggttttcctcccagcgattcagaggacgaacagggtgagcagagcatggctctaatctcagaatatgcttgtgtggttgtggaagagcattttgtgttggacaatcctgaggtgcccgggcaaggctgtagatcctgccagtaccaccgggataagaccggagacacaaacgcctcctgcgctctgtgttacatgaaaaagaacttcagctttatttacagtaagtggagtgaatgtgagagaggctgagtgcttaacacataactgggtgatgcttaaacagctgtgctaagtgtggtttatttttgtttctaggtccggtgtcagaggatgagtcatcaccctcagaagaaaaccacccgtgtccccctgagctgtcaggcgaaacgcccctgcaagtgcacaaacccaccccagtcagacccagtggcgagaggcgagcagctgttgaaaaaattgaggacttgttacatgacatgggtggggatgaacctttggacctgagcttgaaacgccccaggaactaggcgcagctgtgcttagtcatgtgtaaataaagttgtacaataaaagtatatgtgacgcatgcaaggtgtggtttatgactcatgggcggggcttagtcctatataagtggcaacacctgggcactgggcacagaccttcagggagttcctgatggatgtgtggactatccttgcagactttagcaagacacgccggcttgtagaggatagttcagacgggtgctccgggttctggagacactggtttggaactcctctatctcgactggtgtacacagttaagaaggattataacgaggaatttgaaaatctttttgctgattgctctggcctgctagattctctgaatctcggccaccagtcccttttccaggaaagggtactccacagccttgatttttccagcccagggcgcactacagccggggttgcttttgtggtttttctggttgacaaatggagccagaacacccaactgagcaggggctacattctggacttcgcagccatgcacctgtggagggcatgggtgaggcagcggggacagagaatcttgaactactggcttatacagccagcagctccgggtcttcttcgtctacacagacaaacatccatgttggaggaagaaatgaggcaggccatggacgagaacccgaggagcggcctggaccctccgtcggaagaggagctggattgaatcaggtatccagcttgtacccagagcttagcaaggtgctgacatccatggctaggggagtgaagagggagaggagcgatgggggcaataccgggatgatgaccgagctgacggccagcctgatgaatcgcaagcgcccagagcgcattacctggcacgagctacagatggagtgcagggatgagttgggcctgatgcaggataaatatggcctggagcagataaaaacacattggttgaacccagatgaggattgggaggaggccattaagaaatatgccaagatagccctgcgcccagattgcaagtacatagtgaccaagaccgtgaatattagacatgcctgctacatttcagggaacggggcagaggtggtcatcgataccctggacaaggccgccttcaggtgttgcatgatgggaatgagagcaggagtgatgaatatgaattccatgatcttcatgaacatgaagttcaatggagagaagtttaatggggtgctgttcatggccaacagccacatgaccctgcatggctgcagtttctttggcttcaacaatatgtgcgccgaggtctggggcgcttccaagatcaggggatgtaagttttatggctgctggatgggcgtggtcggaagacctaagagcgagatgtctgtgaagcagtgtgtgtttgagaaatgctacctgggagtctctaccgagggcaatgctagagtgagacactgctcttccctggatacgggctgcttctgcctggtgaagggtacggcctctctgaagcataatatggtgaagggctgcacagatgagcgcatgtacaacatgctaacatgcgactcgggggtctgtcatatcctgaagaacatccatgtgacctcccaccccagaaagaagtggccagtgtttgagaataacctgctgatcaagtgccatatgcacctgggtgccagaaggggcaccttccagccgtaccagtgcaactttagccagaccaagctgctgttggaaaacgatgccttctccagggtgaacctgaacggcatctttgacatggatgtctcggtgtacaagatcctgagatacgatgagaccaagtccagggtgcgcgcttgcgagtgcgggggcagacacaccaggatgcagccagtggccctggatgtgaccgaggagctgagaccagaccacctggtgatggcctgtaccgggaccgagttcagctccagtggggaggacacagattagaggtaggtttgagtagtgggcgtggctaatgtgagtataaaggcgggtgtcttacgagggtctttttgcttttctgcagacatcatgaacgggaccggcggggccttcgaaggggggctttttagcccttatttgacaacccgcctgccgggatgggccggagttcgtcagaatgtgatgggatctacggtggatgggcgtccagtgcttccagcaaattcctcgaccatgacctacgcgaccgtggggagctcgtcgcttgacagcaccgccgcagccgcggcagccgcagccgccatgacagcgacgagactggcctcgagctatatgcccagcagcggtagcagcccctctgtgcccagttccatcatcgccgaggagaaactgctggccctgctggccgagctggaagccctgagccgccagctggccgccctgacccagcaggtgtccgatctccgcgagcaacagcagcagcaaaataaatgattcaataaa

SEQ ID NO: 131 - DNA, 18876 bp, Unknown
  Description of Unknown: Human adenovirus D37 sequence
atggccggcggcagtcaggacgtgcgccggttcatggagcgagaggccactccgccccggggccacgggtcggcgcgctatccgccggagcaggagaggagcccctcgccgccgccacctcctctgcccaccaagcgccgaaagtatcagcgggtgggctccgggtcttccgaggaggacgtggtccccgtggacagccctccaaaaaagaagcaagccagaaagaccaagcatgtgaccaaggtagaccccgacgaagagatgccccaggaagacgccgtgatcgtgggagtgggattcagccagcctccggttctgttgaaggaaggcaaggacggaaaacgcatcgtcgagcccgcgacccctggtgtcctgaacgtgcgcaaccccctgagtctgcctctggtctcgtcatgggagaagggcatggataccatgaacgtgctgatggaacgctaccgcgtcgacagcggcttgcgcgatgcttacaagctcatgccggagcagaccgagatcttccagaagatgtgccagacctggatgaacgaggaggcccgcgggatgcaactgacattcaccacccagaaagcatttagcaccattatgggtcgcctgttgcaaggttacattttcagccacagcgggatcgcgcacaagaattgggagtgcaccggctgcgtcctgtgggatcacggctgcaccgaggtggaaggtcagctcaagtgtctgcatggaacggtgatgattcacaaggaccacgtggtggagatggatgtgaccagcgagaacggacagcgcgcgctgaaggagcagcccagcaaggctaaggtgacccagaaccgctggggacggagcgtggtgcaactgaccagccatgacgcgcgctgctgcgtgcatgatgccgggtgcgggaataaccagttcagcgggaagagctgcggcctgttttttagcgagggggccaaggcccagcaagctttcaagcagatcgcggccttcgtcaaggccctctacccgaatatgcagcgcggcgcggggatgatgctgatgcccgtgcactgcgagtgtaaccacaagcctcagagcgtgcccttcctgggccgccagctgtgcaagatgaccccgttcggcctgagcaacgccgaggacctggacaaggatcagattagcgacaagagcgtgcttgccagtgtgaagtaccccagtctgatggtgttccagtgctgcaaccccgtgtaccgcaactcgcgcgcgcagagcaccggtcccaactgcgatttcaagatctccggccctgacatgctgggcgccctgcaaatgagccggcgcatgtggagcgagaccttccccgagactccagtgcccaaactggtgatccccgagttcaagtggcagcccaagttccagtaccgcaacgtggccctccccagcgcggcgcacaacgacgagcgcgagaaccccttcgacttttaaataacttgcatatactccagcgcatgtgtaaaataaaagtgctgtttatttgagtcatacacgcagttgtttcattttatcaaaagcggtggcgtgttcgatggcggcgcggtgggagcgaaagtagggggagtggcgcgcgaggaagcggtagagctcctcctggttgcgcctgagggtgggcagcacctgtggcgattgtagcatgccgttgggcacccccgtcagcaagttcatggtggggttcccgtccatgggtcggtcgggccagtgcacgaaggcatgcaagaacatgcaacagaagagtccgcaggcggcggagtcgggcccctgcacggtctgggtggactgttcgaggctaagacagcgatcgggcgaggaggccagggcgcttcggcgcagcatggcctcgtactcgaagctgtaaatctgcttgagccggcggtccgagaacccgaaggggtcgaacatgtagcaggtgcgcgagcgcgggttccagccaaaggcgagccagtgcacgcccccggtctcgcggccggccgtgttgacgatggcgcaggccagcttgtcgccggcgaggaagcccgggaagcgcttgtcgtgggtgcccaaaaagtagggcccgcagcccaggtcgcgcacgatggccgcgagctctcgttcgctggagccgctcatgcttaggtggtggcgttgccggcggagaagggcgtgcgcaggtagacggcctcgatgacgccgcggtgcggctggtgcactctgaccacgtcgaaaacttcgaagagaagatagaggagggtgggctcatccatggggtccacctcgaaggtcatgtcgagcgcgtgggccgagttggcgtagagcatgttctgacccaggtcggtgagggcgcccatggacatgaagttgctggagaaggggatgcgccacatgaccctgtcgcagaggaactttttctgggtgacggatggcactgcggtggagccgatgagcgggtaggggaagttggcggggtagggctgcccctgacgcatggtgggtgccaggtagccggtgaagccagagttgttgtgctggaagggcagggtgactgccttgtagtccttgtagttgatctcatcgaccacctgcctgctcatgggctggaagttgcggaagaaggagtacatgcggtccttgtagccctcgggcacatggaagccctggtagccgatgttgtagtgggagagcatctggacgaggaaccagtccttggtcatgttgcattgggccacgttgtagccctccccgtcgacgctgcgcttgatctcgaactcgttcggcgtaagcagccggtcgttgccgggccagctgaccgaggagtcgaacatgatggaaaccttcttgaaggtgtggttgaggtagaaggtcccgtcgaggtaggggatggagcccgagtagacaaagtaggggtcaaaacccgagccaagggagggagtttccttggtcttgagccgggtgaaactccagccgcggaaggcggcccagttgcgcgaggggatggaaatgggcacgttggtggccttggccgggatggggtagagcatgttggcggccgagaggtagtcgttgaaggactggtcgttggtgtcgttgcgcagcatggcttccagggtggaggcggtgttgtgcgccatggggaagaaggtggcgtagaggttgacgctgtcgaagcggacggaggcgccgtcgacgcgcaggtcgtttccgagggaactctgcaggatcatgttgacatccttgcggaagttccactcgtaggtgtaggagccggggagcaggagcaggttcttgatggcaaagaacttttggggcacttggatgtggaagggcacgtagcggccattgcccaaaagcatggagcggtagcgcaggcccgcattgcggtggtggttaaaggggttgacgttgtccatggggtccagcgaccagcgggcgccgatgttaatgtaggcgtccaccagcgagggggctaccacgcggccgttcatgtactcataggtgttggtgttggcgggcagcgtgacgttggccggcgtgtacttgtaggagtcgggcaggtacagggccacgttcgagtacagaaaactcttccacaggttggcctggaggttgatctccatggcaaagatgttgccctttccaatttgattatgggctgaaatgtcatcatcctttacccaatctccattaactccgcctcctgtttgatcaggctttagtttaacaccttgataggctgaattagtttgaacaccgtccaaggggaagcaatagttaggaagttcatcttccacaccgtggttctcaatgatcctgacatcgggatcatagctgtccaccgcagagttccacatactaaaatatctggttctgtcaccaagagaatctagcaagagctggtaagacagttcggtgtttctgtcttgcaagtcgaccacggcattcaactgagaagcctgaccagccagcacacccatgttgccagtgctgttgtagtacaatagccccacaaagttgtctctgaagccaatgtagtttggtctgttaggcatggactgctgagttaaattagcttcagaactgtcatcctctttgcctggtttgtacaccacatgtgtatctggagtttccaaatctacattttcagtgtacaacaccacatctggtatatttatagtgcttgagtcaaagaaagccatgtccacatcgtattgaggatcggtaccattgggtgtttctttcaatttagcctgcccaccttccttgtttgtgggtttagcaaatgaaccatagcatggcttcattttggtatcttttttaagagccctgccgccataatattcatcattatcctgccagttttcttctccaacttgaggttctggctggaaagttttgtctgcatagattggtttttcagcatttgctgttttgtcagttccaatctgcaaaccgtctttagaaatattactgcctcccatggcggcaagtccaaatgtctttgtaacatctttttctgctccagttcctccgttttgcttttctttggtagtccactgactgggattgggggcgcccttgggggccaggctgttgtaagccgtgcccgagtagggtttgaagcttgggccgcggtccaggacgccgcggatgtcaaagtaagtgctggccatgtctagcacccggttgtcgcccacggccagagtgaagcgcgccttgtacgagtacgtggtgtcctcgcgatccacgggcacaaagcgcagcgtcagacgctgggaccggtccgtggtcacatcgtgggtgggagccaccgtggggttcctaaacttgttgcccaggctgaagtacgtgtcggtggcgcgggcaaactgcaccagacccgggctcaggtactccgaggcgtcctgcccggcgatgtgcatgtacgcccactgcggcatcatcgagggggtggccatcttcgcgcgttctctggcggtaaggcacatacaagttaagctctccctttagtgtcctctttactctctctcaatagcatcggcggcgcttcagacttttcactcccaggcccacgatactgtgcagcgtgctctgccagttctgggcctggcggcgggcggggacgcggcgcacggcggtcgccaccggagggggctgcacaaccggagctgcttttggtggagcgggcgtgggtggtggaggcaggtcaagggtagcgggtttcattacacccgtggccagcggcgcgatgatgcgcgtggtgggcatgccggccttgacggcctcctcgtacgagggcggctcgtccacttgcaggattgtctcctccgcgtcgggccgcggtcgcttctcgcccttgggcggcggaagagttgcatcttccatctccaccaccgtgggcggccgcgggtccaggcggctgtttatctcgcgctgcacggcctggttcgcgatgtccaccaccccgttaatgcccgaggccagcccgtccaccaccttttgctggaagttctggtctttgagcttttcccttaacaactgcccagtgctactattccaggccttgttcccataggtccggagcgtcgagccgaaatttttaagcccgctccagacactgctccaattgaaggcgcccccgttcagctggctggtgccgatctcgttccaggtgcccatgaacggccgcgtgccgtgccgcggagccagggacgcaaaattgatgtcttccattctaaaaatatacaggaccaggtgtgtcagagtctaaagaggctttattcgcacatcaacggcgctgcgacgcctgcagcgcaacggaagctatgcccgggatcgtgccgatggccgcggcgattatggggatgagcgcgggcagaaagccgccactcaggcgcctgcgcatggcccgccgccggcggcggttcaggccactgcctgccatgcctctcctgcggcgggatcttcctcggtaattcgggacggggatgcgcaggcggcaagtgagagccatctctctgcaacagtatcacagcacacggattaaaggatgctggggtggtagcgcacggtgggcagaacgagcgagcggccccgccgcgtggtcacgcggcgcacgcgggcgggggccagacggcggcgggtggcggtgcggcggcggcgtttgctggctgggcgcctgcggctggcgtagtaccgggtgccgcggtagcctggcgtcgggatgatggaaggatgcaacacgtagttgggcatcagccggctggcggcgccccatcttcgcctcctgggaggctcggtagccgtggcggcggtagaagtggacgcggtagcggtggaggctgggagccaggggtcggtttgcacctcgatgctggtcgagggttttttgtcgacatccatgtcggtggggatctgaatgtccacggtttgcacgcccaggcccggcgccacctgcttgatggggcgcaccttgacctcgggctccacatccatttttacggtgtccagcacgtcctccacgcgccggcgcttgggcaccatgatctgcatggtcgggtacatgctctcgccctcgcgcttgaccccgcggctcggcagcagcactgcctggggcagcacctgctgcagggtcacgggctttaggctcggcgtggggttgctttcgtccagcggcagcgagatcagctcctcttcgcgcgaccgcttcccgtaggcgaactcgcccgcccgctccgccgcctggtccaggatgtcgtcgtcgccgtacacctcgtcatagctacgcttgctcctgaccgaggaccgctcgccgggcgtgaacaccaccgccgtgccgggccgcaacacacgctgcaccctgcgccccttccaatttacgcgccgccgcggagcgaactcgcgcacaaactctactgccccctcgtccacctcatccttttttttaacccgcttgattttgcggggtttctggtccgcctggggtggtccgtaaatctccggggcgacgacctggagcatctcctccttgattttgcgctttgacatcgtcgcttgcgggggaggacacaagcattagatcagggacgaggaggacgggtgcgcacgggcacgcgcacgcccgtgacggagtcgcgcacccagtacacgtttccgcgcctgggtctggtcatgctagagatggccgcggcggcggcagcggccgctcgtctgcgagtcctgcctgcgggggtgggtgcagtggcagcgcggcgcgcggctcgcatcatggcccggcggcccgtgcgtctggcgcggcgcagcagagctcgggcggcgcgcatggcgggcgtgctccggtggcgcctggcgatccgtcgccgccggctcttgcgtctggcatagtcacgcgcgtctgccaccacgctgtcgatgaccgcgtccacggtcgagggggcgggggtgtagttgcgcgcatcggcgaccaccgagtcgatgacgtcgtcgacggtggtgcgcacggcggcaggagcagaggtccgcccccgcttgtaagcgccccagggagcgcggaagtgaccgcggacgcggacggggtgctgctgggagcgtttcttggctcctccgtacatggtgctgggcctagtaagaccccagccggtgttattgctgggcgagatgagaatagacattttttagaaggtgcgactggaaagcacgcgcggcgcgactatgcccagggccttgtagacgtagggacaggtgcggcgacgggcgtcagtgacggtcactcgctggactccgcggatactgctgcgcagcggtagcgtcccgtgatctgtgagagcaggcacgttttcactgacggtggtgatggtgggcgcgggcgggcggcaaaggatctggttgtcggggaagcggttgaagacgtgggtgagggaggtgtagctgcggatgagctgggagtagacggcgaggtcgttgtaaaagctcttggcgcggaagggcatgagctcggcgccgaccacggggtagttgctgacttgctgggtagagcggaaggtgacggggtcttgcatgaggtccggcagcgaccagtagacttgctccgcgccgcaggtgacgtccggggtggtgagcagcgtccacgactgcacccccttctcgggatccccgtaggtataggacaggtaccaactgcggtacagggtgtctgtggttccctcgatcacattgtagcttctgtctgaatcatctttcaaaatggccttcaactcaatttcttttcctgctgctttggcttctgccgctgatgcatagttatctcctcttgggacggcatcattctgagccttaatagtatttgcatctgctttgccagcttcttccttatccttcagatactccttgacattcaggagagcggggatgttgccccctactaggtcctcatacatgattctgaagccctcttgaaaaggttgcttcttgcgaatgcccaggaggttgctcaggcggctctcggtgaaatccaccccgcagcccggcagcagcaccacgtccgggtggaaggcctcgtaggtgtagacccctggcatcaccagcttggtcaccgggtcccagcccagcttgaaatttctgctgtcaaacttgactccgatatcactctccagcacgccattttgccgccccacttgcaagtagttttccaagatggcgttgttcattaggtctatggtcatggtctcggaaaagttgccctcgggcagggtaaactcaaaccactgatactctaagatatccttgctcctatcatttgcatcagccccttccgccttttttctagccaccatcacccgcgccttaaacttgctggtgaacatgtactcgttcacattaggcatgttggtgtgcagaatggtcttcagatcaccgccccaccgcgaccgctcgtcaaaatttatcgtctgcgtgctggcctcggcaggggtgaaatcgttgttctgcaccaccgtggtcaggaagttgctgtggtcgttttggtagttcagggaagcgatgtccgccgacttgttgtccaccaaatacacgcgagtggtgtcgtacagcggagccagctccgagtaacgaatgctgtttctgccctccgtaggagccatataccgcggaggcacaaacggaacctccagggtcgcctgcgccatcacgctctcgtacgagggaggaggagaggaagacaccaccgcgcgcctcatctctaacaaggaagagaacgcacgctatggccttggtgagttttattttgcattcaaaacatccgtcgccccagtctgggctgcagatgcgcgaacgggttggccccaccgctcccgcccaagtccaacacgctgctatcgtcggccgagtcctcgtcgtcccacaccaggccccgctgccggtcgtgacgctgtcgccgcggcgcgggcgcaggttccctatggtcctgagcgtaggttttccagcggttcagtttgtccaccagactctctatcccgttattgaccatggcgttcttgacccgcggcggctgcagcagcgagtcgttcaggtactcgtcctcgcccagcaagcgcggccggctcaccctgccgctgttcaccgagcccggcaagctatgcaaactccctaagctaggaaaggggctccgacccaccgcgccctcgctcgcgggcgtgcgcaccgcctcctggcgcttttgcaaggtcggtgagaacaccgcgctgtccacgtcgtcccacaaaaacccgtcgttggggtcaggcatgtcgtactcgcccgtgtagaaccccggcggcgggagccagtgcgggttcaagatggcattggtaaagtagtccgagttcatggacgccgcgcggtgcaggtagtccatcagcttattaataaacggccggttggcggcgtacatgctaggttccatgttgcgcgcggtcatgtccagcgcggcgctgggggtggccccctcctgcatcaggaacagccctacgctctgctgcacatatctcaggatgcgctcctcctcggccgacagcgcgtactgcgccgggatcttctgctgtctattggtcagcaagaagttcagggtggccctcagactgtcggtgtcgttctgacccagcgcgcggctcacgctagtgatctcctggaaggtctgctcatccacctgcgcctggcctatggcctcgcggtacagcgtcagcaggtgacccaggtacgagttgcggttcacgctgccactgtcggtgaagggcgcgatcagcagcagcagcagccgcgagttgggcgtcagcaagctgctcaccgtcgaccggtcgcccacgggcgcctgcacgccccacagcccgcgcaggttcttgaaagcctgactcaggttcaccgtctgcaggccctgtctgctcgtctggaaaaagtagtccgggcccgactggtacacctcgctctggggcacctcggtcaccatcagccgcagcgcgcttataaagttggtataatcatcctgcccgcgcggcacgttcgccggctgcgtcgccaggaaggcgttcagcgccaccagcgaacccaggccctcgttcttgaaccgctcgcgctgcgccacggcctcgcgcacgtccgtcaccagccggtccaggttggactgcacgtttgtgctgttgtagcggcccacgcgctccagcagggcgttgtacactagcccggcctcgtcgggacggatggccttgttctccgccagcgcgttcacgatcgccagcaccttctcgtgcgtggggttggtccgagaaggaaccaccgcctccagaatggccgagagtctgttggcctgcggctgttgtctaaaggactcggggttgcgggtcgtcagggccatgatgcgttgcatcgcggcctcccagtcgtccgatgctagaccggacggctggctttgcagcgccgcccttatggcggggtccggggcttgctgcatctaaaaacacatcacggaggcgtcagtaccccgcaacgggtgcatcctcctcctcttcctcttcctcatccaagtcctctggaccgtaggcggcctccaaggcgcgtcggctcggctgccaatgcaggtccgcccccatgtcaaagtaggactcctcaccgccggtggcgcctcctaccagcgcccggcgcagactcagcatcagctcgcggtcgctcagctcgcgccgccggcttgtgctcacggccttgtggatgcggtcgttgcggtacacgcccaggtcgtcgctcagcgtcagcaccttgagcgccatgcgcatgtaaaagctgtctatcttcacctccttgtctatgggcacatacggcgtcttgtaaatcttgcgcgcgtaaaacttgcccaggctcagcaccgagtagttgatcgccgccaccttctcggccaggctcaggctgcgctcctgcactacgatgctctgcaagatgttaatcagctccagcagccagcgaccctcgggctcggcgatgttcagcagtgcctccctgaacgcctcgttgtccctgctgtgctgcaccaccaggaacagctgtgccgtcagaggcttgctgtccgggttctgcacgatggcctccgccaggtcccacaggtgcatcaggcccagggccacctcctcgcgcgcgatcagggtgcgcacgtggttgttgaaactcttttggaagttgcgctcctgcttcaccgtctgctcgtaggccgtcaccaggttggccgccgccacgtgcgcgcgcgcggggctgatccccgtctgctcgttcggctcgaaatcctcgtcgcgcagcacgcgctggcggtccaggccctcgcgcagctccctgcccgcccgaaaccggcagtcgcgcatctcctcgggctcctccccgctgcggtccctgaacaggttctgcgcaggcacgtacgccgggcgcacgtccttctgcagctgcacgcggggatgtcgctccggggacggcgcccccagtctcgccagcccttcgccctcttccaagtccatctctgtctgtggctgtggctggctagcgccggcgcctgctacggccgcggtcgcggtggtcgccgggggggtgggacgcatttggcgcaggacgggatgcatctggcaaaaagaaaaaagggggctcgctcccgtaactggagaagtcggctggctgtgggtctttaaatcggcggggtgaccaagtcccgctcgccgcggccgtccttgaaccgggttctgccgcgactcaaccctggcgatgcttctccagactacgggcgcgagccactacccggcagggttttcggccgctttcaagtctagcgactcccctcggccgacaaaaagggctctccgccgtatcctggcggctatcgggcttgggtcgagacgggagtgccaataccacgttagtcgcggctccagcctgattcgaggggactcgaaccggggtacacacgcggcctaacccgtttgcgttccgccaggctacggaggaagagcccgctcaaccgctttcgtttttgcctctagagcatcaatgactgcgcgcgtctcaccggccagaccgtgccgaccatggactatttcctgcccctgcgcaacatctggaaccgcgtccgcgagttcccgcgcgcctccaccaccgccgccggcatcacctggatgtcccgctacctctacggctaccaccgactcatgcttgaggacctggccccgggcgcgccggccacccagcgctggccgctctaccgccagccgccgccgcactttctagtcggataccagtacctcgtgcgcacctgcaacgactatgtcttcgactcgcgcgccttctcgcggctcaggtactccgaggtcgtgcaacccggcctgcagaccgtcaactggtcgcttatggccaactgcacttacaccatcaacacaggggcctaccaccgcttcgtcgacatggacgacttccaggacaccctcacccgcgtgcaacaggccatcctcgccgagcgcgtcgtcgccgacctggcgctcgtgcagccgttcaggggcgtcggggtcacccgcatggaagactccgcctccgccagtgatgacatcgagaggctcatgcatgactactacaagaacctgagccggtgtcagggccaggcctggggcatggccgagcggctccgcatccagcaagcgggacccaaggacctggtcctcctcgccaccatccgccgcctcaaaaacgcctacttcaattacatcatcagcaaccgcaattctaacagcgtccacagggctgctacgtgtttgagcttaccttgcgactgcgattggctagacgctttcctcgaaagattctccgatccggtcgatctcgacgcgctcacgtgccctacaccgcaattgataagatgcattgtcagcgccctatcgctgcccaacggggacccaccccattaccgggagatgaccggcggcgtcttcacgctgcgtcctcgcgaacggggtcgcgccgtcaccgaaaccatgcgtcgccgccgcggggagatgatcgagcgcttcgtcgaccgtctcccggtgcgtcgccgtcgtcgtcgggccccgccaccaccaccgcccccagaggaagaaatagaagaagaggtcgtcatggaagaagaggaagaggaggaggcccccggggatttcgagcgcgaggtgcgcgccaccatcgccgaactcatcaggctcctggaagacgagctcacggtctcggcccgcaacgcccagtttttcaacttcgccgtggatttctacgaggccatggaaaggctggaggccattggcgacatcagcgaaatgcccctgcgccgctggattatgtacttcttcgtcaccgagcacatcgccaccaccctcaactacctcttccaacgcctgcgcaactatgccgtcttcgcgcggcacgtggagctcaacctcgcgcaggtggtcatgcgcgcgcgcgacgccgacggggacgtggtttacagccgcgtctggaacgagagcggcctgggcgccttctcgcagctcatgggtcgcatctcgaatgaccttgccgccaccgtagagcgcgcgggccgcggcgatctccaggaggaggaaatcgagcagttcatgtccgagatcgcctaccaggacaactcgggcgacgtgcaagagatcctgcgtcaggccgccgtcaatgacgccgagattgattctgttgaactgtctttcaggttcaaagtcacggggcccgtggtcttcacgcaaaggcggcagatccaggatgtcaaccgccgcgtcgtcgcgcacgccagcgctctcagggcgcagcaccgggacctgcccgagcgccacgccgacgtgcctctaccgccactgcccgcggggccggaaccgccgctgccgccgggagcgcgtccgcgacaccgcttctaaaagcgcaccgcggcacggtcgtggccccgcgcagctacgggctcatgcaatgcgtggacacgaccaccaactcacccgtggagatcaagtaccatctgcatctcaagcacgccctcacccgcctctacgaggtcaacctcagaaccctgcccccggacctggatctccgcgacaccatggacagctcccaactgcgcgccctcgttttcgctctccgcccccgccgcgccgagatctggacctggctcccgcgcgggctcgtcagcctctccgtcctcgaggagccccagggtgagtcccacgcaggcgaacatgaaaaccaccagccagggccgccactcctgaagttcctcctcaagggacgcgctgtgtatctcgtggatgaggtacagcccgtgcagcgctgcgagtactgcggacgcttttacaagcatcagcacgagtgctcggttcgccggcgggatttctactttcatcacatcaacagccactcgaccaactggtggcaggaaatccagttcttcccaatcggctctcatcctcgcacggagcggctctttgtcacctacgatgtagaaacctacacctggatggggtccttcggcaagcagctcgtccccttcatgctggtcatgaaattctccggggaccccgagctggtcgccctcgctcgcgatctcgccgtgcgcttacgctgggatcgctgggagcgggaccccctcaccttctactgcgtcaccccagaaaagatggccgtgggccagcagttccgcctctttcgcgacgagctccagaccctcatggcccgcgagctctgggcttcattcatgcaagccaacccacatctccaggagtgggcgctcgagcagcacggcctgcaatgccccgaggacctcacctacgaggaactcaaaaagctgccgcacatcaaaggccgcccgcgattcatggaactctacatcgtcgggcacaacatcaacggcttcgacgagatcgtcctcgccgcccaggtcatcaacaaccgagcctccgttccgggccctttccgcatcacccgcaatttcatgccgcgggcaggcaagattctcttcaatgacgtcactttcgctctgcctaaccccctctcgaagaagcgcaccgatttcgagctctgggagcacggcggctgcgacgactcggatttcaagtaccagttcttgaaagtcatggttagggataccttcgccctgacgcacacctcgctccgcaaggccgctcaagcttacgccctccccgtggagaagggctgctgtccctacaaggccgtgaaccatttctacatgctgggctcttaccgtgcggacgatcgaggattcccgctccgggagtactggaaggatgacgaggagtacgccctcaaccgcgcgctgtgggagaagaaagaagaggcgggttatgacatcatccgtgaaacgctggactactgcgccatggacgtccttgtcaccgccgagctcgttgccaagctgcaagactcctacgcgcacttcatccgcgactcggtccgcttgccccacgcccactttaacatcttccaacggcccaccatctcctccaactcgcatgccatctttcgccagatcgtcttccgcgccgagcagccccagcgcaccaatctcggccccgctttcttggccccctcgcacgagttgtatgactatgtgcgcgccagcatccgcggggggcgctgttatcccacctacatcggcatcctctcggagcccatctatgtctacgacatctgcggcatgtacgcctccgccctcacgcatcccatgccctggggtccgcccctcaacccctacgagcgagcgctggccgcccgcgagtggcagatggccttggatgatgcatcctcaaaaatcgattattttgacaaggaactctgtccgggcatcttcaccatcgatgcggacccccctgacgagcatctgcttgatgtgctgcccccgttctgctcgcgcaagggcggacgcctctgctggaccaacgagcccctgcgcggcgaggtggccaccagcgtggacctggtcaccctgcataatcgcggctggcgcgtcaggatcgtgcccgacgagcgcaccaccgtcttcccagaatggaagtgtgtcgcgcgcgagtatgtccagctcaacatcgcggccaaggagcgcgccgaccgtgacaaaaatcagaccatgagatccatcgccaagcttctctccaacgccctctatggctcctttgccaccaagcttgacaataaaaaaatagtcttttctgaccagatggatgaaagtctcctaaaaagcattgcggcagggcaggccaacatcaaatcctcctcgtttctagaaactgacaacctgagtgccgaggtcatgcccgctctcgagagggaatacctaccccaacagctggcgctcgtggacagcgacgcggaagagagtgaggacgagcacagacccgcccccttttatacccccccgtcggggacccccggtcacgtggcctacacctacaagccaatcaccttcttggatgcggaggagggggacatgtgtctgcacacggtggaaaaggtggaccccctggtggacaacgaccgctacccctcgcacgtggcctcctttgtcttggcgtggacgcgcgcctttgtctcagagtggtccgagtttctctacgaggaggaccgcgggacgcccctgcaggacaggccaatcaagtccgtctacggggacacagacagcctgtttgtcaccgaacgcggacacagactcatggagacgcgaggtaagaagcgcatcaaaaagaacgggggaaaactggtttttgaccccgagcagcccgagctcacctggctcgtcgagtgcgaaaccgtctgcgcccactgcggagcggacgccttcgctcccgagtccgtctttctcgcacccaagctctacgccctgcaatccctcctctgtcccgcctgcgggcgctcttccaaaggcaagctccgtgccaagggccacgccgccgaggcccttaactacaagctcatggtcaactgctatctcgccgacgcgcagggcgaagaccgtgcccgtttcagcaccagcaggatgagtctcaagcgcacccttgcaagcgcccagcccggggcccaccccttcaccgtgacggagaccaccctcactcggaccctgagaccctggaaggacatgacgctggccgcgctggacgcccatcgtctcgtgccctacagtcgcagtcgtcccaacccccgaaacgaggaagtctgctggatcgagatgccgtagagcacgtcaccgagctatgggaccgcctggagctcctctcgcagacccttgccaagatgcccatggccgacgggctcaagcccctgaaaaactttgcttccctgcaagagctgctctcgctgggcggggaccgcctcctcggcgagctcgtccgggaaaacctccaagtgagagacatgctcaacgaggtggcccccctcctccgggacgacggcagctgcatctccttgaactaccacctgcaacccgtcatcggggtcatctacggcccgaccgggtgcggcaagtcccagctgttaagaaacctgctctcctcgcagctcatcacccccgccccggaaaccgtttttttcatcgccccgcaggtggacatgatccccccctccgagatgaaagcctgggagatgcagatctgcgaggggaacttcgccccggggcccgagggaacgatcgtcccccaatctggcacccttcgccccaaattcattaaaatgtcttatgatgatctcacccaggagcataattatgatgtctctgaccccagaaacgtttttgccaaagccgcagcccacgggcccattgccatcatcatggatgagtgcatggaaaacctgggcgggcacaagggcgtctccaaattcttccacgcattcccttccaagttgcatgataagttccccaagtgcacgggctacaccgttctggtggtcctgcacaatatgaacccccggcgggatctgggtggcaacatcgccaacctcaagatccaggccaaactgcacatcatctccccccgcatgcatccctcccagcttaaccgctttgccaacacctacaccaaggggctccccgtggccatcagtctcctcctcaaggacatcatccagcaccacgcccagcgcccctgctatgactggattatctacaacacgaccccagagcacgaggccatgcagtggtgctacctccacccccgggacgggctcatgcccatgtacctcaacatccaatcccacctctaccgggtcctggaaaaaatccaccgcactctcaatgatcgggagaggtggaccagggcctaccgcgcgcgaaaaaataaataa

SEQ ID NO: 132 - DNA, 4574 bp, Unknown
  Description of Unknown: Human adenovirus D37 sequence
atgtcctatggtgactcggctgagctcgctcggttgaggcatctggaccactgccgccgcctgcgctgctttgcccgggagagctacggcctcatctactttgagctgcccgaggagcaccccaacggccctgcacacggagtgcggatcaccgtagagggcaccaccgagtctcacctggtcaggttcttcacccagcaacccttcctggtcgagcgggaccggggcgccaccacctacaccgtctactgcatttgtcctaccccgaagttgcatgagaatttttgttgtactctttgtggtgagtttaataaaagctaaactcttgcaatactctggaccttgtcgtcatcaactcaacgagaccgtctacctcaccaaccagactgaggtaaaacttacctgcagaccacacaagacctatatcatctggttcttcgagaacacctcatttgcagtctccaacactcactgcaacgacggtgttgaacttcccaacaacctttccagtggactgagttacaatacacgtagagctaagctcatcctctacaatccttttgtagagggaacctaccagtgccagagcggaccttgcttccacagttttactttggtgaacgttaccggcagcagcacagccgctccagaaactaaccttccttctgatactatcaaaccttgtttcggaggtgagctaaggcttcccccttctcaggagggggttagcccatacgaagtggtcgggtatttgattttaggggtggtcctgggtgggtgcatagcggtgctagctcagctgccttgctgggtggaaatcaaaatctttatatgctgggtaagacattgtggggaggaactatgaaggggctcttgctgattatcctttccctggtggggggtgtgctgtcatgccacgaacagccacgatgtaacatcaccacaggcaatgagaggaacgactgctctgtagttatcaaatgcgagcaccattgtcctctcaacattacattcaaaaataagaccatgggaaatgtatgggtgggattctggcaaccaggagatgagcagaactacacggtcactgtccatggtagcaatggcaatcacactttcggtttcaaattcatttttgaagtcatgtgtgatatcacactacatgtggctagacttcatggcttgtggccccctaccaaggataacatggtgggtttttctttggcttttgtgatcatggcctgcttgatgtcaggtctgctggtaggggctctagtgtggtttctgaaacgcaagcccaggtatggaaatgaagagaaggaaaaattgctataaattctttttctttttcgcagaaccatgaatacagtgatccgtatcgtgctgctctctcttcttgtagcttttagtcaggcaggatttcatactatcaatgctacatggtgggctaatataactttagtgggacccccagacacaccagtcacttggtatgatactcaaggattgtggttttgcaatggcagtagagttaagaatcctcaaatcagacatacatgtaatgatcaaaaccttactttgatccatgtgaacaaaacttatgaaagaacatacatgggttataatagacaagggactaaaaaagaagactacaaagttgtagttataccacctcctcctgctactgtaaaaccacagccagagccagagtatgtgtttgtttatatgggagagaacaaaactctagaaggtcctccgggaactccagtcacatggtttaatcaggatggaaagaaattttgtgaaggagaaaaagttcttcatccagaatttaaccacacctgtgacaaacaaaaccttatactactgtttgtgaattttacacatgatggagcttaccttgggtacaatcatcaaggaacccagagaacacactatgaagttacagtattagatctttttccagattctggccaaatgaaaattgaaaatcatagtgaggaaacagagcaaaaaaatgatgaacatcataactggcagaaacagggtgggcaaaaacagggtgggcaaaaaacaaatcaaacaaaagttaatgacaggagaaaaacagcgcaaaaaagaccatcaaagctaaagccggcaactattgaggcaatgctggttacagtgactgccgggtctaacttaactttggttggacctaaagcagaaggaaaagttacttggtttgatggagatttaaaaagaccatgtgagcctaattacagactaagacacgaatgtaataatcaaaacttaactctgattaatgtaactaaagattatgagggaacttactatggtacaaatgacaaagatgagggcaaaaggtacagagtgaaagtaaatactacaaattctcaatctgtgaaaattcagccatataccagacaaactactcctgatcaagagcacaaatttgaattacagttcgaaactaatggaaattatgattcaaaaattccctcaaccactgtggcaatcgtggtgggtgtgattgcgggcttcataactctgatcattgtcttcatatgctacatctgctgccgcaagcgtcccagggcatacaatcatatggtagacccactactcagcttctcttactaagactcagtcactttcatttcagaaccatgaaggctttcacagcttgcgttctgattagcctagtcacacttagtgtagctattaaaaatcaatatcatgttcataatgttaccagagatggatatatcacattaaatgtaacaattgataatactacctggacaagatatcatttaaataagtggcatcaaatttgtacgtggtcagacccatcatacaaatgtcacagcaatggcagcattaccattcatgctttcaatattacttctggccagtacaaagctgaaagttttactaactggtttagatattacggtaatcataaacatgaaattcatatttttaacataactgtaattgagcatcctacaacaaaagcacccaccactgctaatacagctacatcaattaaatcaacaaccacacagcctactactagggagacaactcaacctaccaccacagtcagtacaactactgagaccactactcaaactacacagctagacacaacagtgcagaatagcactgtgttggttaggtatctgttgagggaggaaagtactactgaacagacagaggctacctcaagtgcctttagcagcactgcaaatttaacttcgcttgcttggactaatgaaaccggagtatcattgatgaatcatcagcctttctcaggtttggatattcaaattacttttctggttgtttgtgggatctttattcttgtggttcttctgtactttgtctgctgcaaagccagagagaaatctaggaggcccatctacaggccagtaatcggggaacctcagccactccaagtggaagggggtctaaggaatcttcttttctctttttcagtatggtgatcagccatgattcctaggttcttcctatttaacatcctcttctgtctcttcaacatctgcgctgcctttgcagccgtctcgcacgcctcgcccgactgtctcgggcccttcccaacctacctcctctttgccctgctcacctgcacctgcgtctgcagcattgtctgcctggtcatcaccttcctgcagcttatcgactggtgctgtgcgcgctacaattatctccatcacagtcccgaatacagggacaagaacgtagccagaatcttaaggctcatctgaccatgcagactctgctcatgctgctatccctcctatcccctgccctagccacttatgctgattactctaaatgcaaattcgcagacatatggaatttcttagattgctatcaggaaaaaattgatatgccctcctattacttggtgattgtgggaatagtcatggtctgctcctgcactttctttgccatcatgatttacccctgttttgatctcggctggaactctgttgaagcattcacatacacactagaaagcagttcactagcctccacgccaccacccacaccgcctcctcgcagaaatcagttccccctgatacagtacttagaagagccccctccccgacccccttccactgttagctactttcacataaccggcggcgatgactgaccaccacctggacctcgagatggacggccaggcctccgagcagcgcatcctgcaactgcgcgtccgtcagcagcaggagcgggccgccaaggagctccttgatgccatcaacatccaccagtgcaagaagggcatcttctgcctggtcaaacaggcaaagatcacctacgagctcgtgtccaacggcaaacagcatcgccttacctatgagatgccccagcagaagcagaagttcacctgcatggtgggcgtcaaccccatagtcatcacccagcagtcgggcgagaccaacggctgcatccactgctcctgcgaaagccccgagtgcatctactcccttctcaagaccctttgcggactccgcgacctcctccccatgaactga

SEQ ID NO: 133 - DNA, 1098 bp, Unknown
  Description of Unknown: Human adenovirus D37 sequence
atgtcaaagaggctccgggtggaagatgacttcaaccccgtctacccctatggctacgcgcggaatcagaatatccccttcctcactcccccctttgtctcctccgatggattcaaaaacttcccccctggggtactgtcactcaaactggctgatccaatcaccattaccaatggggatgtatccctcaaggtgggaggtggtctcactttgcaagatggaagcctaactgtaaaccctaaggctccactgcaagttaatactgataaaaaacttgagcttgcatatgataatccatttgaaagtagtgctaataaacttagtttaaaagtaggacatggattaaaagtattagatgaaaaaagtgctgcggggttaaaagatttaattggcaaacttgtggttttaacaggaaaaggaataggcactgaaaatttagaaaatacagatggtagcagcagaggaattggtataaatgtaagagcaagagaagggttgacatttgacaatgatggatacttggtagcatggaacccaaagtatgacacgcgcacactttggacaacaccagacacatctccaaactgcacaattgctcaagataaggactctaaactcactttggtacttacaaagtgtggaagtcaaatattagctaatgtgtctttgattgtggtcgcaggaaagtaccacatcataaataataagacaaatccaaaaataaaaagttttactattaaactgctatttaataagaacggagtgcttttagacaactcaaatcttggaaaagcttattggaactttagaagtggaaattccaatgtttcgacagcttatgaaaaagcaattggttttatgcctaatttggtagcgtatccaaaacccagtaattctaaaaaatatgcaagagacatagtttatggaactatatatcttggtggaaaacctgatcagccagcagtcattaaaactacctttaaccaagaaactggatgtgaatactctatcacatttaactttagttggtccaaaacctatgaaaatgttgaatttgaaaccacctcttttaccttctcctatattgcccaagaatga

SEQ ID NO: 134 - DNA, 126 bp, Unknown
  Description of Unknown: Human adenovirus D37 sequence
atgtcaaagaggctccgggtggaagatgacttcaaccccgtctacccctatggctacgcgcggaatcagaatatccccttcctcactcccccctttgtctcctccgatggattcaaaaacttcccc

SEQ ID NO: 135 - DNA, 429 bp, Unknown
  Description of Unknown: Human adenovirus D37 sequence
cctggggtactgtcactcaaactggctgatccaatcaccattaccaatggggatgtatccctcaaggtgggaggtggtctcactttgcaagatggaagcctaactgtaaaccctaaggctccactgcaagttaatactgataaaaaacttgagcttgcatatgataatccatttgaaagtagtgctaataaacttagtttaaaagtaggacatggattaaaagtattagatgaaaaaagtgctgcggggttaaaagatttaattggcaaacttgtggttttaacaggaaaaggaataggcactgaaaatttagaaaatacagatggtagcagcagaggaattggtataaatgtaagagcaagagaagggttgacatttgacaatgatggatacttggtagcatggaacccaaagtatgacacgcgcaca

SEQ ID NO: 136 - DNA, 540 bp, Unknown
  Description of Unknown: Human adenovirus D37 sequence
ctttggacaacaccagacacatctccaaactgcacaattgctcaagataaggactctaaactcactttggtacttacaaagtgtggaagtcaaatattagctaatgtgtctttgattgtggtcgcaggaaagtaccacatcataaataataagacaaatccaaaaataaaaagttttactattaaactgctatttaataagaacggagtgcttttagacaactcaaatcttggaaaagcttattggaactttagaagtggaaattccaatgtttcgacagcttatgaaaaagcaattggttttatgcctaatttggtagcgtatccaaaacccagtaattctaaaaaatatgcaagagacatagtttatggaactatatatcttggtggaaaacctgatcagccagcagtcattaaaactacctttaaccaagaaactggatgtgaatactctatcacatttaactttagttggtccaaaacctatgaaaatgttgaatttgaaaccacctcttttaccttctcctatattgcccaagaa

SEQ ID NO: 137 - DNA, 1560 bp, Unknown
  Description of Unknown: Human adenovirus D37 sequence
atgaggcgcgcggtggtgtcttcctctcctcctccctcgtacgagagcgtgatggcgcaggcgaccctggaggttccgtttgtgcctccgcggtatatggctcctacggagggcagaaacagcattcgttactcggagctggctccgctgtacgacaccactcgcgtgtatttggtggacaacaagtcggcggacatcgcttccctgaactaccaaaacgaccacagcaacttcctgaccacggtggtgcagaacaacgatttcacccctgccgaggccagcacgcagacgataaattttgacgagcggtcgcggtggggcggtgatctgaagaccattctgcacaccaacatgcctaatgtgaacgagtacatgttcaccagcaagtttaaggcgcgggtgatggtggctagaaaaaaggcggaaggggctgatgcaaatgataggagcaaggatatcttagagtatcagtggtttgagtttaccctgcccgagggcaacttttccgagaccatgaccatagacctaatgaacaacgccatcttggaaaactacttgcaagtggggcggcaaaatggcgtgctggagagtgatatcggagtcaagtttgacagcagaaatttcaagctgggctgggacccggtgaccaagctggtgatgccaggggtctacacctacgaggccttccacccggacgtggtgctgctgccgggctgcggggtggatttcaccgagagccgcctgagcaacctcctgggcattcgcaagaagcaaccttttcaagagggcttcagaatcatgtatgaggacctagtagggggcaacatccccgctctcctgaatgtcaaggagtatctgaaggataaggaagaagctggcaaagcagatgcaaatactattaaggctcagaatgatgccgtcccaagaggagataactatgcatcagcggcagaagccaaagcagcaggaaaagaaattgagttgaaggccattttgaaagatgattcagacagaagctacaatgtgatcgagggaaccacagacaccctgtaccgcagttggtacctgtcctatacctacggggatcccgagaagggggtgcagtcgtggacgctgctcaccaccccggacgtcacctgcggcgcggagcaagtctactggtcgctgccggacctcatgcaagaccccgtcaccttccgctctacccagcaagtcagcaactaccccgtggtcggcgccgagctcatgcccttccgcgccaagagcttttacaacgacctcgccgtctactcccagctcatccgcagctacacctccctcacccacgtcttcaaccgcttccccgacaaccagatcctttgccgcccgcccgcgcccaccatcaccaccgtcagtgaaaacgtgcctgctctcacagatcacgggacgctaccgctgcgcagcagtatccgcggagtccagcgagtgaccgtcactgacgcccgtcgccgcacctgtccctacgtctacaaggccctgggcatagtcgcgccgcgcgtgctttccagtcgcaccttctaa

SEQ ID NO: 138 - DNA, 2850 bp, Unknown
  Description of Unknown: Human adenovirus D37 sequence
atgtgccttaccgccagagaacgcgcgaagatggccaccccctcgatgatgccgcagtgggcgtacatgcacatcgccgggcaggacgcctcggagtacctgagcccgggtctggtgcagtttgcccgcgccaccgacacgtacttcagcctgggcaacaagtttaggaaccccacggtggctcccacccacgatgtgaccacggaccggtcccagcgtctgacgctgcgctttgtgcccgtggatcgcgaggacaccacgtactcgtacaaggcgcgcttcactctggccgtgggcgacaaccgggtgctagacatggccagcacttactttgacatccgcggcgtcctggaccgcggcccaagcttcaaaccctactcgggcacggcttacaacagcctggcccccaagggcgcccccaatcccagtcagtggactaccaaagaaaagcaaaacggaggaactggagcagaaaaagatgttacaaagacatttggacttgccgccatgggaggcagtaatatttctaaagacggtttgcagattggaactgacaaaacagcaaatgctgaaaaaccaatctatgcagacaaaactttccagccagaacctcaagttggagaagaaaactggcaggataatgatgaatattatggcggcagggctcttaaaaaagataccaaaatgaagccatgctatggttcatttgctaaacccacaaacaaggaaggtgggcaggctaaattgaaagaaacacccaatggtaccgatcctcaatacgatgtggacatggctttctttgactcaagcactataaatataccagatgtggtgttgtacactgaaaatgtagatttggaaactccagatacacatgtggtgtacaaaccaggcaaagaggatgacagttctgaagctaatttaactcagcagtccatgcctaacagaccaaactacattggcttcagagacaactttgtggggctattgtactacaacagcactggcaacatgggtgtgctggctggtcaggcttctcagttgaatgccgtggtcgacttgcaagacagaaacaccgaactgtcttaccagctcttgctagattctcttggtgacagaaccagatattttagtatgtggaactctgcggtggacagctatgatcccgatgtcaggatcattgagaaccacggtgtggaagatgaacttcctaactattgcttccccttggacggtgttcaaactaattcagcctatcaaggtgttaaactaaagcctgatcaaacaggaggcggagttaatggagattgggtaaaggatgatgacatttcagcccataatcaaattggaaagggcaacatctttgccatggagatcaacctccaggccaacctgtggaagagttttctgtactcgaacgtggccctgtacctgcccgactcctacaagtacacgccggccaacgtcacgctgcccgccaacaccaacacctatgagtacatgaacggccgcgtggtagccccctcgctggtggacgcctacattaacatcggcgcccgctggtcgctggaccccatggacaacgtcaacccctttaaccaccaccgcaatgcgggcctgcgctaccgctccatgcttttgggcaatggccgctacgtgcccttccacatccaagtgccccaaaagttctttgccatcaagaacctgctcctgctccccggctcctacacctacgagtggaacttccgcaaggatgtcaacatgatcctgcagagttccctcggaaacgacctgcgcgtcgacggcgcctccgtccgcttcgacagcgtcaacctctacgccaccttcttccccatggcgcacaacaccgcctccaccctggaagccatgctgcgcaacgacaccaacgaccagtccttcaacgactacctctcggccgccaacatgctctaccccatcccggccaaggccaccaacgtgcccatttccatcccctcgcgcaactgggccgccttccgcggctggagtttcacccggctcaagaccaaggaaactccctcccttggctcgggttttgacccctactttgtctactcgggctccatcccctacctcgacgggaccttctacctcaaccacaccttcaagaaggtttccatcatgttcgactcctcggtcagctggcccggcaacgaccggctgcttacgccgaacgagttcgagatcaagcgcagcgtcgacggggagggctacaacgtggcccaatgcaacatgaccaaggactggttcctcgtccagatgctctcccactacaacatcggctaccagggcttccatgtgcccgagggctacaaggaccgcatgtactccttcttccgcaacttccagcccatgagcaggcaggtggtcgatgagatcaactacaaggactacaaggcagtcaccctgcccttccagcacaacaactctggcttcaccggctacctggcacccaccatgcgtcaggggcagccctaccccgccaacttcccctacccgctcatcggctccaccgcagtgccatccgtcacccagaaaaagttcctctgcgacagggtcatgtggcgcatccccttctccagcaacttcatgtccatgggcgccctcaccgacctgggtcagaacatgctctacgccaactcggcccacgcgctcgacatgaccttcgaggtggaccccatggatgagcccaccctcctctatcttctcttcgaagttttcgacgtggtcagagtgcaccagccgcaccgcggcgtcatcgaggccgtctacctgcgcacgcccttctccgccggcaacgccaccacctaa

SEQ ID NO: 139 - protein, 361 aa, Unknown
  Description of Unknown: Human adenovirus D37 sequence
MSKRLRVEDDFNPVYPYGYARNQNIPFLTPPFVSSDGFKNFPPGVLSLKLADPITITNGDVSLKVGGGLTLQDGSLTVNPKAPLQVNTDKKLELAYDNPFESSANKLSLKVGHGLKVLDEKSAAGLKDLIGKLVVLTGKGIGTENLENTDGSSRGIGINVRAREGLTFDNDGYLVAWNPKYDTRTLWTTPDTSPNCTIAQDKDSKLTLVLTKCGSQILANVSLIVVAGKYHIINNKTNPKIKSFTIKLLFNKNGVLLDNSNLGKAYWNFRSGNSNVSTAYEKAIGFMPNLVAYPKPSNSKKYARDIVYGTIYLGGKPDQPAVIKTTFNQETGCEYSITFNFSWSKTYENVEFETTSFTFSY

SEQ ID NO: 140 - protein, 143 aa, Unknown
  Description of Unknown: Human adenovirus D37 sequence
PGVLSLKLADPITITNGDVSLKVGGGLTLQDGSLTVNPKAPLQVNTDKKLELAYDNPFESSANKLSLKVGHGLKVLDEKSAAGLKDLIGKLVVLTGKGIGTENLENTDGSSRGIGINVRAREGLTFDNDGYLVAWNPKYDTRT

SEQ ID NO: 141 - protein, 176 aa, Unknown
  Description of Unknown: Human adenovirus D37 sequence
LWTTPDTSPNCTIAQDKDSKLTLVLTKCGSQILANVSLIVVAGKYHIINNKTNPKIKSFTIKLLFNKNGVLLDNSNLGKAYWNFRSGNSNVSTAYEKAIGFMPNLVAYPKPSNSKKYARDIVYGTIYLGGKPDQPAVIKTTFNQETGCEYSITFNFSWSKTYENVEFETTSFTFSY

SEQ ID NO: 142 - protein, 519 aa, Unknown
  Description of Unknown: Human adenovirus D37 sequence
MRRAVVSSSPPPSYESVMAQATLEVPFVPPRYMAPTEGRNSIRYSELAPLYDTTRVYLVDNKSADIASLNYQNDHSNFLTTVVQNNDFTPAEASTQTINFDERSRWGGDLKTILHTNMPNVNEYMFTSKFKARVMVARKKAEGADANDRSKDILEYQWFEFTLPEGNFSETMTIDLMNNAILENYLQVGRQNGVLESDIGVKFDSRNFKLGWDPVTKLVMPGVYTYEAFHPDVVLLPGCGVDFTESRLSNLLGIRKKQPFQEGFRIMYEDLVGGNIPALLNVKEYLKDKEEAGKADANTIKAQNDAVPRGDNYASAAEAKAAGKEIELKAILKDDSDRSYNVIEGTTDTLYRSWYLSYTYGDPEKGVQSWTLLTTPDVTCGAEQVYWSLPDLMQDPVTFRSTQQVSNYPVVGAELMPFRAKSFYNDLAVYSQLIRSYTSLTHVFNRFPDNQILCRPPAPTITTVSENVPALTDHGTLPLRSSIRGVQRVTVTDARRRTCPYVYKALGIVAPRVLSSRTF

SEQ ID NO: 143 - protein, 949 aa, Unknown
  Description of Unknown: Human adenovirus D37 sequence
MCLTARERAKMATPSMMPQWAYMHIAGQDASEYLSPGLVQFARATDTYFSLGNKFRNPTVAPTHDVTTDRSQRLTLRFVPVDREDTTYSYKARFTLAVGDNRVLDMASTYFDIRGVLDRGPSFKPYSGTAYNSLAPKGAPNPSQWTTKEKQNGGTGAEKDVTKTFGLAAMGGSNISKDGLQIGTDKTANAEKPIYADKTFQPEPQVGEENWQDNDEYYGGRALKKDTKMKPCYGSFAKPTNKEGGQAKLKETPNGTDPQYDVDMAFFDSSTINIPDVVLYTENVDLETPDTHVVYKPGKEDDSSEANLTQQSMPNRPNYIGFRDNFVGLLYYNSTGNMGVLAGQASQLNAVVDLQDRNTELSYQLLLDSLGDRTRYFSMWNSAVDSYDPDVRIIENHGVEDELPNYCFPLDGVQTNSAYQGVKLKPDQTGGGVNGDWVKDDDISAHNQIGKGNIFAMEINLQANLWKSFLYSNVALYLPDSYKYTPANVTLPANTNTYEYMNGRVVAPSLVDAYINIGARWSLDPMDNVNPFNHHRNAGLRYRSMLLGNGRYVPFHIQVPQKFFAIKNLLLLPGSYTYEWNFRKDVNMILQSSLGNDLRVDGASVRFDSVNLYATFFPMAHNTASTLEAMLRNDTNDQSFNDYLSAANMLYPIPAKATNVPISIPSRNWAAFRGWSFTRLKTKETPSLGSGFDPYFVYSGSIPYLDGTFYLNHTFKKVSIMFDSSVSWPGNDRLLTPNEFEIKRSVDGEGYNVAQCNMTKDWFLVQMLSHYNIGYQGFHVPEGYKDRMYSFFRNFQPMSRQVVDEINYKDYKAVTLPFQHNNSGFTGYLAPTMRQGQPYPANFPYPLIGSTAVPSVTQKKFLCDRVMWRIPFSSNFMSMGALTDLGQNMLYANSAHALDMTFEVDPMDEPTLLYLLFEVFDVVRVHQPHRGVIEAVYLRTPFSAGNATT

SEQ ID NO: 144 - protein, 42 aa, Unknown
  Description of Unknown: Human adenovirus D37 sequence
MSKRLRVEDDFNPVYPYGYARNQNIPFLTPPFVSSDGFKNFP

SEQ ID NO: 145 - DNA, 114 bp, Unknown
  Description of Unknown: Human adenovirus 50 sequence
caatcaatataatataccttatagatggaatggtgccaatatgtaaatgaggtaatttaaaaaagtgcgcgctgtgtggtgattggctgcggggtgaacggctaaaaggggcgg

SEQ ID NO: 146 - DNA, 114 bp, Unknown
  Description of Unknown: Human adenovirus 50 sequence
ccgccccttttagccgttcaccccgcagccaatcaccacacagcgcgcacttttttaaattacctcatttacatattggcaccattccatctataaggtatattatattgattg

SEQ ID NO: 147 - DNA, 365 bp, Unknown
  Description of Unknown: Human adenovirus 50 sequence
acatgctgggaggtgacgtgacttatgggggaggagttatgttgcaagttatcgcggtaaaggtgacgtaaaacgaggtgtggtttggacacggaagtagacagttttcccacgcttactgacaggatatgaggtagttttgggcggatgcaagtgaaaattctccattttcgcgcgaaaactgaatgaggaagtgaatttctgagtcatttcgcggttatgacagggtggagtatttgccgagggccgagtagactttgaccgtttacgtggaggtttcgattaccgtgtttttcacctaaatttccgcgtacggtgtcaaagtcctgtgtttttacgtaggtgtcagctgatcgctagggtat

SEQ ID NO: 148 - DNA, 3431 bp, Unknown
  Description of Unknown: Human adenovirus 50 sequence
ttaaacctgtcgagttccgtcaagaggccactcttgagtgccagcgagaagagttttctcctccgcgccgcgagtcagttttgcgctttgaaaatgagacacctgcgattcctgccacaggagattatctccagcgagaccgggatagaaatactggagtttgtggtaaataccctgatgggagatgacccggaaccgccagcgcagcctttcgatccacctacgctgcacgatctgtatgatttagaggtagacgggccggacgatcccaatgaggaagctgtaaatgggttttttactgattctatgctactagctgccgatgaaggattggacataaaccctcctcctgagacccttgataccccaggggtggttgtggaaagcggcagaggtgggataaaattgcctgatctgggagcagctgaaatggacttgcgttgttatgaagagggttttcctccgagtgatgatgaagatggggaaactgaacagtccatccataccgcagtgaatgagggagtaaaagctgccagcgatgtttttaagttggactgtccggagctgcctggacatggctgtaagtcttgtgaatttcacaggaataacactggaatgaaagaactattgtgctcgctttgctatatgagaatgcactgccattttatttacagtaagtgtatttaagtgaaatttaaaggaatagtgtagctgtttaataactgttgaatggtagatttatgtttttacttgtgattttttgtaggtcctgtgtctgatgatgagtcgccttctcctgattcaactacctcacctcctgaaattcaggcgcccgtacctgcaaacgtatgcaagcccattcctgtgaagcctaagtctgggaaacgccctgctgtggataagcttgaggacttgttggagggtggggatggacctttggaccttagtacccggaaactgccaaggcaatgagtgccctgcagctgtgtttatttaatgtgacgtcatgtaataaaattatgtcagctgctgagtgttttattgcttcttgggtggggacttggatatataagtaggagcagatctgtgtggttagcttatagcaacctgctgccatccatggaggtttgggctatcttggaagacctgagacagactaggctactgctagaaaacgcctcggacggagtctctggcttttggagattctggttcggtggtgatctagctaggctagtgtttaggataaaacaggactacagggaagaatttgaaaagttattggacgacagtccaggactttttgaagctcttaacttgggccatcaggctcattttaaggagaaggttttatcagttttagatttttctactcctggtagaactgctgctgctgtagcttttcttacttttatattggataaatggatccgacaaacccacttcagcaagggatacgttttggatttcatagcagcagctttgtggagaacatggaaggctcgcagcatgaggacaatcttagattactggccagtgcagcctctgggagtagcagggatactgagacacccaccgaccatgccagcggttctggaggaggagcagcaggaggacaatccgagagccggcctggaccctccggtggaggagtagctgacctgtttcctgaactgcgacgggtgcttactaggtctacgtccagtggacaggacaggggcattaagagggaaaggaatcctagtgggaataattcaagaaccgagttggctttaagtttaatgagccgtaggcgtcctgaaactgtttggtggcatgaggttcagagcgaaggcagggatgaagtttcaatattgcaggagaaatattcactagaacaacttaagacctgttggttggaacctgaggatgattgggaggtggccattaggaattatgctaagatatctctgaggcctgataaacagtatagaattactaaaaagattaatattagaaatgcatgctacatatcagggaatggggcagaggttataatagatacccaagataaagcagcttttagatgttgtatgatgggtatgtggccaggggttgtcggcatggaagcagtaacatttatgaatattaggtttaaaggggatgggtataatggcattgtatttatggctaacactaagctgattctacatggttgtagcttttttgggtttaataatacttgtgtagaagcttgggggcaagttggtgtgaggggttgtagtttttatgcatgctggattgcaacatcaggtagggtcaagagtcagttgtctgtgaagaaatgcatgtttgagagatgtaatcttggcatactgaatgaaggtgaagcaagggtccgccactgcgcagctacagaaactggctgcttcattctaataaagggaaatgccagtgtgaagcataatatgatctgtggacattcgaatgagaggccttatcagatgctgacttgcgctggtggacattgcaatattcttgctaccgtgcatatcgtttcccatgcacgcaagaaatggcctgtatttgaacataatgtgattaccaagtgcaccatgcacataggtggtcgcaggggaatgtttatgccttaccagtgtaacatgaatcatgtgaaggtgatgttggaaccagatgccttttccagagtgagcttaacaggaatctttgatatgaatattcaactatggaagatactgagatatgatgacactaaaccgagggtgcgcgcatgcgaatgcggaggcaagcatgctagattccagccggtgtgcgtggatgtgactgaagacctgagacccgatcatttggtgcttgcctgcactggagcggagttcggttctagtggtgaagaaactgactaaagtgagtagtggggcaagatgtggatggagactttcaggttggtaaggtggacagattgggtaaattttgttaatttctgtcttgcagctgccatgagtggaagcgcttcttttgaggggggagtatttagcccttatctgacgggcaggctcccatcatgggcaggagttcgtcagaatgtcatgggatccactgtggatgggagacccgtccagcccgccaattcctcaacgctgacctatgccactttgagttcgtcaccattggatgcagctgcagccgccgccgctactgctgccgccaacaccatccttggaatgggctattacggaagcatcgttgccaattccagttcctctaataacccttcaaccctggctgaggacaagctacttgttctcttggctcagctcgaggccttaacccaacgcttaggcgaactgtctaagcaggtggcccagttgcgtgagcaaactgagtctgctgttgccacagcaaagtctaaataaagatctcaaatcaataaa

SEQ ID NO: 149 - DNA, 19668 bp, Unknown
  Description of Unknown: Human adenovirus 50 sequence
atggccagccgcggaggaaatcagtcaagcgaccgccaacgggagcacacccccgaacgcggaatgggctctgccagccatccgcctccaaggccggaccgcagcccatctcagtcgcctccacctctgcccccgaagaggaacacctaccgtcgcgtggggtccgattcttctatcgagagccaggtggtactggtaagcgaaacttcgcggtcatccctgtctccggaacggagcaacagtcctcccccgatccctcccaagaagaagcccaggaagaccaagcatgtccctctgcaagacatcagccaggacagcgaagaagaaagagaacaggctcagttggtggccgtgggcttcagctaccccccggtgcgcatcattgagaaggatggcaagagaagtgttgagaagatcgacaagaatgaccctatagctaaaggagctacttctattgctgttaggaatcctttgagcttgcccctggtatctgcctgggagaagggcatggaagtgatggctgtgctaatggagaggtataggctggataatgacctgagaacctctttcaagctgatgccagagcagcacgagcagtacaagcgtatctgccaccagtatgtgaacgaggagcaccgtggcatcccgctgacatttagtagcatgaagaccctgacagcgatgatgggaagattcatgcagggattggtgcattcttattctgagatcgcccacaataattgggagtgcaccgggtgcgctctgtgggctcatggatgcaccgattacgaaggcaaggtgaaatgcctgcatggcactatcatgatccagaaggaccacattatcgagatggatgtggcgagcgaaaacgggcagcgcgctatgaaggagaacccagacagagccaagatcacccagaaccgctggggcagaaatgtggtccagttggccaacaacgatgcccgctgctgtgtgaatgatgccaactgtgctactaaccaattttccagcaagtcctgtgggatgttttacaccgagggaagtaaggctcaggaagctttcaagcagtacgaagccttcatgaaggccgtgtacccagggataacccccgaccaagccaggatgatgctgatccccattcattgcgattgcaaccacaagccaggctgcgctcccgtgatgggcaggcagacctgtaagatgaccccctttggaatggccaatgctgaagacttggatgtgactaccatcagtgacccgaccgtgctggcaagcgtgagacacccagccttgatggtgttccagtgttgcaacccagtgtaccgcaactcccgtgtccagaatgccggccccaactgtgatttcaagatctctgctcctgacctgcttggcgccctgcaactgaccagaaagttgtggcaagacacctttcccgaaattccagttcccaagctggtgatccccgagttcaagtggcagaacaggttacagttccgcaacgtctccctgcccacgggtcactctgactcccgccagaacccatttgatttctgagtgaatgatgaaaacgaatgagcaaaaaaccagagccttagtgcatgtaaaaataaaatgctttttattgaacacggttttacatgacttattgcatatccatacggtcaaacgcggtggccctttcaatgcgtgcgcggtgagaacgaaagtaagatgagtgggtgtttaggaagcgatatagcgcctcctggttgcggcgcagggtgggctggacttggggtgattggagcatgctgtttgacaccccagtcagcaacttcatggtggggtttccgttcatggggcggtcgggccagtgcacaaaggcatgaaggaacatacagcaaaaaagtccacaggcggctgagcgcgggccctgcacgctctgggtggacttttccagggtgatgcagcggtctttggtagcaagggcactgcggcgcaggagcccctcgtactcaaactggtaaatctgtttgagtcgctcatccgagaacccaaaaggatcaaaaaggtagcaggtgttggagcgcgggttccaaccaaaagccagccagtgctctccccccgtctcgcgtccggcagtgttgactatggcgcaggcgagcttgtcgggggccatgaaccccgggaaacgcttgtcaaaggttcccaggaaatagggtccgcagcccaggtctcggacgatggctttgagctcttgctcgctggagccgtttccggacccgcatgacatggctgcagctgctgcttgcaagaagcaagaggcttcttatgtggtggcgttgccggccgagaacggtgtgcgcaggtagacggcctcgatgacgccgcggtgtggctggtgcactctgaccacgtcgaagacttcgaaaagaagataaagcagggtgggctcatccatgggatccacctcaaaagtcatgtccagcgcatgggccgagttggcatacagcaagttctgtcccaggtctgtaagggcacccatggacatgaagttgctagagaatgggatgcgccacatggtcctgtcgcacaggaattttttctgggtgacactggttactgcagtggttccaattagggggtatgggtagttagcagggtacgcttgaccctgacgcatggtaggagccatgtaacccacaaagccagagttattatgctggtagggtacggcgacagctttatagtctttgtagttaatctcatcaaccacctgtctactcatgggctggaagtttctgaagaaggagtacatgcgatccttgtaaccctcaggaacgtagaagccctggtatccaatgttgtagttggcaagcatctggaccaggaaccagtctttggtcatgttacattgggccacattgtagccttccccatcaactgtgcgcttgatttcgaactcatttggacttagcaatctgtcattaccaggccagctcactgaagagtcaaacatgatggagactttcttgaaagtgtggttaaggtagaaggtaccatccaggtagggtatagaaccagagtaaacaaagtagggatcgaaccctgatcccaaagagggagtctccttggttttgagtctggtgaaggaccagcctctgaaggcggcccagttgcgagagggaatggagatgggaacgttggtagcgttggccgggatggggtagagcatgttggcagcagaaaggtagtcattgaatgattgatcattggtgtcattgcgcagcatggcttcaagggtggaggcagtgttgtgggccatggggaagaaggtggcatagagattgatgctggtaaaacttatgctggcaccatcgacccggagatcattaccaagggaactctgcaggaccatgttcacatcctttctgaagttccactcgtaggtgtaagaaccgggtagaagcagcaggttcttcacagcaaagaatttctgaggcacttgaatgtggaaaggcacgtaacgaccattgcccaaaagcatggaccggtatcgcaggccagcgttgcggtgatggttaaaggggttgacattgtccatggcatccaaagaccatctggcgccaatgtttacgtaggtatccaccagggatgggggaaccacccgcccattcatgtagtcataagtgttggtgttagttggaagagtgacattggctggggtgtatttgtaggagtctgggagatacagagccacattggaataaagaaaacttctccagagattagcttggaggttaatttccatggcaaacggatttcccttagcaatttcacttatgccctttggctctaaatctttccaagtagtggtttcatcaccatttgtctcaattcccttgtaactgtctattcgcggacctacaccatccaatggaaaacaatagttaggaagttcatcttccacaccatggttctcaataacacgcacatctgggtcatagctatccactgcttgattccacatactgaaatatctggttctgtcccccagagaatcaagcaagagttgatatgacaattctgtgtttctgtcttgcaagtcaaccactgcatttagctgagacgcttgtccagccagcactcccatgttgccagtactgttgtagtacatgagtccgatgaagttgtccctgaagccaatatagttaggtctattgggcatggactgttgaccaaggtttgcatgagagctagcatctgaagctccaggtttgtacaccacatgagtgtcaggagtttctagatccacattttctgcatacattacaattttaggcttgaggccagtcatttgtgatcttaggtcgaaaaagttcatgtcaatgtcatattcaaccttgccttcttcttctttcttcacttttgcctgcccgcctttaacattagtaggtttagcgaaagacccgtagcagggtttcattttagtttcaggtttaagtgctctgcctccatatttttcatctgtgccatccgtatcagtccaagattcctctcccacctgaggttctggctgatacagtttatcagcataaatgggtttagggccaccttcagatggaacttccaaacctattggcagtccttcttttgtaatttcagcttcggcttttactggcgcattgccaaaagtgtatgtagcttgttggtcgtcttccccatcctcttcatctcccttattaagccactgagatgtattgggagcgcccttaggggccaatgagttgtaagcagtgccagaatatggcttgaagctaggacctctatccaacacaccccgaatgtcaaagaaagtgctggccatatccagcactctgttgtcgcccacagccaaggtgtatcgaactttgtatgcgtaggtattgtcttcccggtcaacgggcacaaagcgcagcatcagccgctgactgcggtcggtggtcacatcatgggtgggcgccacggtggggttcctaaacttgttccccagattgaagtaggtgtctgtggcgcgggcgaactgcaccagacccggactcaggtactccgaagcatcctgtccggcgatgtgcatgtatgcccactggggcagcatcgatggggtggccatcttgaaatcaactcagcctcggcgcgcgacctcttccttgctcctctgctgttgctgcggcggcggcgtgatgatgacacatacacacagacaggcaagttaagcgctactccatatttaatttaaaagcagcgacggcgctttacactttgcacgcccagacccacgatgctgttcagagtactctgccagtttgcattcggacgtggagtgcccccaggacgcggtctggctacggcgacgggctgtacggtggtgggcttcggggtagcgacaggcttgcgagcaggcgctgcaacagcagggggaggcaagtccaaggtagcgggtcggtgtgactgagaaggtttcattaccccggtagccatgggggctacaggtctggtggtgggcattccaagcttcactgcctcctcgtaggagggcgggtcgtctgagcgtgtgactagtgtctcctccagatcggggcgcggacgcttgtcgccccgcttttcaaggggagggagatcttcctccacttccatttcaccaggggctgacggcggcgggtcaaggcggctgtttatctgtttctgcacggcctggttggccagatccaccaccccattgataccagaggcgattccatcaaccaccttctgttggaagttttgctctttaagcttatttttcaatgcctgccctgtgctgctgttccaagctttgttcccataggtttttatggtagagccaaaatttttaagcccgctccagatactgctccaattgaaggcgcccccgttcagttggctggtgccgatgtcgctccaggtgcccatgtacggcctcgtgccgtgtcgcggagccagggatgaaaaattgatgtcttccatctctacaaaaacatagtcacaggaccaggagcatcagagtccattctgttttatttataagtttttccaatgtcagtggcgctgcgaggcctgaaccgccacggaagctatgcctggtatcgccccgatcgccgcggctatgatggggatcagagcaggcagaaagccaccccccagcctcttgctgatagcgcgccgccgcctgtggcgtcgcattccgcgccccaacatccctcttctacggcgcgagtttcttcctcggtagccagtaatggggacacgaaggcggcaagtgagggccatatctgcaaggaggcagcggcaacagttgttaagttgtgatgcttggatggtagcgtacgcgcggtaacgtcaggggatccgcgcggccatcgcgatacactctccgcaccagagcagcgggagtcagattgctggtggggcggcggcgacgacgatgactacgacttgcaggtgttttgcggcgacggcgggaagtgctgctcctgctgcggtagtagcgagtgcctcggtaacccggagttggaataatggatgggtgcagagcataatttggcatcagcaaacttgctggaccgtactttcgccgggatcttcgagtggtgttgacagcagctggagttgtaacgggtgcggtcatccagggatccgtttgcacctcaatggaggtggttgtgggctttgcaggttcggtttggacttccattgactcggtgggaatcttgatgtctacggtttgtactcccaaacctggcgccacctgcttgatgggtctcactttgacctcaggttgtatatcgggatccactttcattttctccagcacgtcctccagccgctggcgcttgggcaccatcaattgcatagtgggatacagatcctcaccctctcgcttgttgcctctgcgtggaggcacgggcagcacttgctgcagggtgactggcttgagactaggggtgggattcccattgtccaagggaatggacaccgcctcctccttggggctcgagcgggagcgcttgccataagcaaactcgcccaggcggtcggccgcctgctccagaatatcatcatccccatacacctcatcataggaccgcttaaaagcagtgctggagcgctcgccgggcgtaaagaccaccgtggttccaggtctcagcacaggctgcactttgcgtccacgccactgcactcgccgccttggggcgaactcgcgtacaaactccgccagaccatcattgccatcttcttcctttttgtcctttttgacccgcttgattttgcggggctttttttcatccttcaccggcggaccgtagatttcaggcgcgatgacctggagcatctcttccttgtatttgcgcttggacatcctcgctgggacacaacatcggagactgctcagtatcttctaagagcgaggggggcgggtgcgcacgggcacgcgctggccggtggtggcgtcgcgcacccagtacacattgcctcttcgcggttgggccatgttggcaatggccgctgctgccgccgtggctgcgcgcctgcgggacctgccggcactggcacctgaagccgcgcgtctggccgctctaagcatagctcttcgccccacgcgtttggccctcctcagcagagctcttgccgctcgcatagcgggagtagcccggtggcgcctggcgatgcgtctccgcctgctcttccggcgagcataggcgcgggcgtcagccactacgctgtcaataactgcatccacagtagatgtaggtgcagtaggagtataattacgagcatcggccaccacctggtcgatcacatcatcgacggtggttctagtgcgggtacgacccttgagggcgccccatggagcgcggaagtgcccgcgcacgcgcacagggtgctgtgtagagcgtttgcgagcacctccgtacatcttgcttggcgcgcgcaggccccaaccggtgttattactaggtgagataagaatggacatttttttttagaaagtgcggcttgaaaggacgcgcggcgcgactatgcccagggccttgtagacgtaggggcaggtgcggcgtctggcgtcagtaacggtcacgcgctggactccccggatactgctgcgcaacggcagggtcccgtgatctgtgagagcaggaacgttttcactgacggtggtaatggtgggcgctggcgggcggatgaggatctggttctcagggaagcggttgaagacgtgcgtgagcgaggtggactggcgaagctgctgggagtacacggcttgctcgttgtagaaactctttgagaagaccggcatgagctctgcacctaccactggatagttgctgacttgtctcgtggaacggaatgtgacagggtcctgcatcatgtctgggagcgaccagtacacctgctctgctccacaggtgacatccgaggtggtgagcagtgtccaggaacggactcctttttcagggtcaccatagttgtaggacaggtaccagctgcggtaggctgtattcactttatcttccaagacattgtaacttctactcttgctgtctttttctacaggtttaatagtgagtttggtctctgtagtttcggccacagcagccaatagcgattcttcagttgcaacagatgaagctgtatagttgtctcctctgacttcttcggcattagccacccttacagggtcgctgacaactatgttggctttagcaatagcagcagctttagcggcttctgttttggcttctcgttctttcttactgttcttataggcttctacatccaacagggccgggatattacccccttcaagatcctcatacaagatcttaaaaccctcctggaatgggtgtcttttcctgataccaagcaagttactaaggcgactttcagtaaagtcaactccgcaaccaggcaacaatacaatgtcaggatggaatgcctcataggtgtaaaccccaggcataatcaacttagtttccggatcccaacccagtctaaagttcctggtgtcaaatttaacaccaatgtcactctccaacactccattctgtctgcccacttcaaggtaattatcaatgatggcattgttcattaggtcaatggtcattgtggctgagaagttcccttccggtagagtaaactcaaaccactcatattccaaaatatcctgcttgtgatcataattgtcatctactgtgacaccttcaggagcctttctagacaccatcacccgagctttgaacttgttgctaaacatgtactcgttcacgttgggcatgttggtgtgcatgatagtcttcagctgaccgccccatcgcgaccgctcgtcaaagttgatggtctgggtgctggcctccgtgggggtaaagtcattgttttgcaccaccgtggtgaggaagttgctgtggtcgttctgatagttcagtgaggcgatgtccgcggacttgttgtccaccaaatacaaccgggtggtatcatacaatggtgccagctccgagtaacgaatgctgtttctcccctccgtaggtgccaggtaccgagggggtacaaagggagcctccagtggtggctgcatcgccgccgccgccgcctgctgcatcacgctctcgtacgaaggaggaggaccctccggatacaccaccgctccgcctagcacggttcgcctcatcatactagctataacagagaagaaacgaacgcacgctggtcgccatggccttggtgagtatttattttcggtttcttacatcaggcgcccgacgcgggggcgcaggtgagcgaacgggttaccaccactcccacccaagtccaacacgctgctgtcgtcggcggaatcatcatcggcccacaccaggccccgctgcctgtcgtgccactggcgtttacgggtagcgatgccccggctatcccccagcgcccggggatcgtccctgtgatcgtgcgcgtacgtcttccagcggttcattttgtcaaccaagctttctatcccgttgttggggaaattcttctccctctcgggtctcaacagggagtcgttcaaatactcctcctcgccgatcaagcgaggacgggttattcttcccagctcactgctgcgtacactgtttagcgaaaatggcaaactagggaaaggacttgcggcctcgggagccgctgcagcacccgttgctccggacagtgacacggaagagtgccttctatcgccaccttccttcttccaagtgttataaccaggaggcggggagaaaacactactgtccacatcgtcccataaaaacccgtcattggggtcgggcatgtcatactcgcccgtatagaacccaggtgggggcagccaatgggggttcaggatagcattggtgaaataatcagagttcatagcagccgccctgtgtaagtagtctagcagtttattgataaaaggccggttactggcatacatgctgggctccatgtttcgggctgtcatatcgagcgcagcagtaggagtcgccccctcctgcattaggaacagtcccacgctctgctgcacgtatctcaggatccgttcctcctccgcggtaagcgaatactgaggagggatcttctgcgaccggttggtcagcaagaagtttaaggtggcttccaagctgccagtgtcctcccgacccagagcgcggctcacttgggtaatttcttgataggtttgctcatctacctgagtttgccctatggcctcgcgatacaggttcaacagatagcccaagtacgaattacggtcgatgctaccgctgtcagtgaatggggctaccaagagcagtagtaggcgggagttgggggtcagcaagctagacacggtcgcccgatctcccactggggcgcgcactccccacagaccattcaggttcttaaaagcctggctcaggttcactgtctgcaagccctgtctgctggtctggaaaaagtagtctggcccggactggtacacttcgctttgagggacttcggccaccatgagtctcaatgcacttagaaagtttgtgtagtcttgctgaccgcgaggcacgttggcaggctgagtgctgaggaaggcgttcaaagccaccagcgaccctaaattggcgtctcgctggaaccgctcgcgctgagacacggcctcgcgcacatcggtcaccatccggtccaggttggtctgcacgttgctgctgttgtaacgggctacgcgctccaatagggcattgtataccagcccagcctcatcgggacgtatggctttgttctccaccagcgcgttcacgatggccaggaccttctcgtgtgtggggttggagcgggagggcactacggcctccaggatggcagaaaggcggttggcctggggttgctgtctaaaggcttcggggttgcgggtcgtcagcgccatgatgcgttgcatggcctggctccaatcgtccgaggagttaatgccggacggctggctctgtagcgccgcccgttttgcggggtccggtgcctgctgttccatctagcaaaaatatggatggtcgcgccatcagtcttccagatactcgccctcctcatcctggccttcatccacctcttctatgtaaggaagctcataccctgctgcgtccagggccctgcgactgggctgccactgcaagtccgctcccatgtcaaagtagttttccccctcggttccagccccagtcagagctctttgcaagctgtgcataagttctctgtcgctcagctcacgccttctgctggcgctcactgcgcggtgcatcctgtcgttgcggtacactcccagatcgtcactcaaggtcagcaccttgagagtcatgcgcatataaaacccatctatcttcacctccttgtctataggtacgtatggggttttgtagatcttgcgagcgtagtgcttgcccaggctcaagaccgagtagttaatagcagccaccttctcagctagacccaggctacgttcttgcacgattatactttgcagaatattgataagatcatacaaccatctcccctcgggctcagtaatgttcaacagcgcctccctaaatgcctcattgtctctactatgttgcaccaccagaaacagctgagcggttagaggtttgctggtggggttctgggtaatggcttccatcaggtcccacaggtgcatcagacccagtgtcacttcctcgcgggcaatcagggtgcgcacatggttgttgaaagatttttgaaagttgcgctcctccttcacggtctgctcgtaagctgatactaggttggccgcggccacatgtgccctagcaggacttattcctgtcacttcatcgacttcaaaatcatcatcacgcagcacccgtcttcggtccagaccgtgacgcagttcgcgacccgcgttaaagcgggaagctcgcatttcctcaggctcctcgccgctcctgtccctgaacaggttctgctggggcacgtacgcctcgcgagagtcctttttcagttgcacccgcgggtgccgctcgggcgatggtgcgcccaggcgcgccagtccctcgccctcttccaagtccagatcataggcgggctgccccgcgccgctgacggctgcagccgcagtagttacaggagcaggaagagccttttgtggctgttgttgtagctgctgctgagaagggggctgttgctgggggcgcatctgtcgcagcacgggatgcatctgggcaacaaaaaaacaaaaaaagagggctcgctcccgtaaactggagaagtcggctggcggggtcttagaaatgacgaggctgccaaaccctcgcttgtcgcggaaaccggccgatccggcgcgctaagactcgaaccggggcacaccgcaacgcaaccctggcgattgattctccagactacgggcgcgagccactcccagccccgagaactgagtgttctaaagcttgacgcagcattggctcccatccaggaaaaagccaaaaaaaaaaaaacgacccgcctccgtatcctggaggttttgtgcaggcctgggtcgagacgggagtgccagtaccacgttagctgcggctccagcctgatccgagattcgaaccggggtacacgcgcagcccaacccgttcgcttagcctccaggccacggagacgagccgctgaccgctttcgtttttgcccgtatgtctagagcatcaacgactgtgcacgtctcacgggccaaaccgtgcctaccatgaactacttcatgccgctgcgcaacatctggaaccgcgtacgcgagttcccgcgggcatccaccaccgcctccggtatcacctggatgtccaggtacatctacggttatcaccgcctcatgctggaagacctcgcccctggcgccccggctacagagcgatggcccctataccgccagccgccgccgcactttctcatcggctaccagtacctggtgcgcacctgtaacgattacatctttgacacccgcgcatactcgcgccttaagtataccgagcttgtgcgccctgggcaccagacagtcaactggtcagtcatggccaactgctcctacacaatcaacaccggggcttaccaccgcttcgtggactttgacgacttccaagccaccctcacccaggtgcagcaagccatcctcgcagaaagggttgtagcggacctggcacttgtccagcccatgcgcgggttcgggatcactcgcatgcatggcagagcgggcgaagaagaagtgcccgtggaacgactcatgcaagactactataaagatctggccagatgtcaggataatgcttggggaatggcccatcgcctgcgcatccaacaagccggacccaaagacctggtgctcctcgccaccatccgccgtctcaaaactgcctattttaatttcatcaccagcagcatcgtctcaccctccaaagaggaggaaggagaagaaagagagaaccccgaccgagcgtctagccgcccccgcccgcaagaaacagtgctcagcctaccttgcgattgcgactggttagacgctttcgtcgaaaggttttcagatcccgtggatcttgagacgatcaggtccttgcgcggagtacctacggggcaattaataaaatgcataatcagcgcggtgtccctgcccaacggagagcctcccagtcaccacttcagggagatgcgcggaggcgtcttcactctgagacccagggagaacggtcgtgccgtcaccgagaccatgcgccgccgccgcggagaggtcattgaaagattcatcgaccgtctgcccgtgcgccgccggcgtcgccgcgttccccctcctcctgcagccccacctgaagaggaagagatgttagtggaagaagaagagattgaggaagaaatcccaggggctttcgagctcgaggtgcgcaccaccatcgccgaactcatccgtcttttggaagaagagttgaccgtgtccgcgcgtaactcccagtttttcaactttgccgtggacttctacgaggccatggagcgcttggaagcgctgggcgatgtcagcgagatgccgctgagacgatggatcatgtatttcttcgtcaccgagcacatcgccaccacactcaactaccttttccagcgcctatgcaactatgcggtcttcacccgccacgtggagctcaacctcgcccaggtggtcatgcgcgcgagagatcccgtgggggctgtggtctacagccgcgtctggaacgaggcgggcatgaatgcattctctcaactcattgggcgtatctccaacgacctcgcggccaccgtcgagagagcgggccgcggagatcttcaagaggaagagatcgagcagttcatggccgagatcgcctaccaggacaactctggcgacgtgcaagaaatccttaggcaagccgccgtcaacgataccgagattgattctgttgaactctctttcaggttcaagctcacggggccggtagctttcacccagaggcgtcagatccaggatgtcaaccgccgcgtcgtggcgcatgcgagtcttctgagggcgcagtaccagaacctacccgcgcgcggcgccgacgtaccactgccggccatgccgccgggtcccgaaccgcccctgccgcccggtgcgcgccctcgacaccgcttctaaacatgcaagaagcaacagagccaccgccgcccaaaaggaaaaacaagggcacggtggtagcgcccaaggggcacggaaccctgcaagccatcgacatctccaccaacggacccgtggagatcaagtaccatctgaacctccctcacgccctcgaaaagatcatgcaagtcaatctcctgacactgcctactaacctgactccgcagcgtctcaggaccctggacagctccggcctgcgcgctctcgtcctcgagctccgcccctgccgcgccgaggtctggacttgcctcccgcgagggctcgtcagcatgaccaccatcgagacagaagatggtcatgccgatgcagacaacatagtagagcgcgaggtacaatcgccaggcctcaattttccactgaaatttctcgtcaaaggaagtcaggtacaactcattcatgaggtgcatcccgtgaatcgatgcgagtactgcggccgtctgtacaagcacaagcatgaatgctcggcgcgtcgcagggagttctacttccatcacatcaacagccattcctccaactggtggcaggagatccagttcttcccgattggctctcatcctcgcacagaaaggctcttcctcacctacgatgtggaaacctacacctggatggggtcctttggcaagcagctaatccccttcatgctggtcatgaaactctctggagaccagcggctcgtcaacatcgcctatgacctggccataaaactcaagtgggatcgctggcggcaggacccccaaaccttctattgcgtcaccccagaaaagatggcagtcgggcagcattttcgtcagtaccgggaccagttacaaacagcactggcagtggacctctggtcctccttcctcaaagcgaaccctcacgtgcacgaatgggccctcgaacactatgctctcactgaccctacagacctcacttttgaagaactcaagaagctgcctcatgtcaggggcacccctcgattcttagaactgtacatagtggggcacaacatcaatggctttgatgagatcgtcttggccgctcaggttatcaataaccgagcagaggtccctcagcctttcagaatcacccgaaatttcatgcccagggccggcaagatcctcttcaatgatgttactttcgctttgcccaaccccgcctacaagaagcgggtggacttccaactctgggaacagggggcctgtgatgacatcgacttcaagtatcaattcctcaaagtcatggtcagggacacttttgccctcactcatacctcgctgcgcaatgcagcccaagcatactctctcccagtggagaagggatgctgtccctacaaggcagtcaatcagttctacatgttgggctcttaccgtgcagaaaaagacgggtttcccctcgaagagtactggaaggatcgcgaagaataccttctcaaccgcgagctgtgggaaaagaaaagccaaccgcgttatgacatcatccaggaaactctcgactactgtgccctggacgtactcgtcaccgccgagctggtagccaagctgcaagagtcatatgcccacttcataagggactctgtaggcctacctcatgcccattttaacatattccagagacctactatctcttccaattcccatgccatctttcgccagatcgtttacagggcggaaaaacccaaccgcaccaatctgggcccgggtcttctcgccccctcacatgaactctatgactatgtgcgagcaagcatcagaggggggcgctgttatcccacttacatcggcatcctcgaagagcccctctatgtctacgatatctgtggcatgtatgcctccgcgctcacccaccccatgccctggggcacccctcttaacccctacgagcgcgcgctggcagttcgagaatggcagatgaccttggatgatcccgccaccatcagctattttgacaaagatttgctaccgggaatatttaccatagatgcggacccccctgatgagttcatgctagaccccctcccccctttctgttcaagaaaaggaggtcgactctgctggaccaatgagcccctccgaggcgaggtagccaccagtgtggatctgataaccctgcacaataggggatggcgagtcagaatagttccggatgaactgacaaccatcttccctgaatggaaatgtgtggcgcgcgagtacgtccagcttaacatcgccgccaaggagcgcgcggacaaggaaaagaaccaaaccatgcgctccatcgccaagcttctatccaatgccctctatggatcatttgccaccaagctggataacaagaagattgtgttttctgaccagatggacgagagtcttatgaaaggcatctctgctggtactgtcaatatcaaatcctcctcgttcctagaaactgacaacctgagtgcagaggtcatgcccgccttcgagagagaatacctaccccaacagctggcgctcctggacagtgatccggaagacagtgaggacgaacagaggcccgcccacttttatacccccccggcggggacccctggtcacgtggcctacacttacaagccaatcacattcttggatgtggaggagggggacatgtgtttacataccgtagagaaggtggaccccctggttgacaacgaccgctacccctcccacgtggcctcctttgtgctggcctggacacgcgcttttgtatcagagtgggctgggttcctctacgaagaggaccgaggcactccgctcgaggacaggcccataaagtcggtctacggggacacggacagcctctttgtcacccagcggggacacgaactcatggaaaccaaaggtaagaaacgcatcaaaaaacatggcggaaaacttgtttttgaccccgatgagccggatctgacctggctcgtggagtgcgaaaccgtctgcgcctcctgcggtgcggatgcatactcccccgaatccattttcctcgcgcccaagctgtatgccctcaaatgtatctactgccccgcctgccataaaacttccaaaggtaagctccgtgccaaaggccacgcggccgaggcgctcaactacgaactcatggtaaactgctacctggccgacatgcagggcgccgatcggcagcggttctcgaccagcaggatgagtctgaagcgcaccctcgcaagcgcccaaccaggcgcgcaccccttcaccgtgacggaaacaaccctgactcggacgctgcgaccatggaaggatcggaccctagcagcgctggacgctcatcgtctgattccctactccaggagccgtcccaacccgcgaaacgaggaggtctgctggatcgagatgccatagagcacatcaccgagctctgggaccggctcgagctcttgcaacagactctttccaaaatgcccatggctgacgggctgaaaccgttgaaaaacttctcctcgctccaggagcttctatcccttgggggagagcgcctcctaacggacttggtgcgggaaaatatccatgtaagggaaatgatgaacgaagtggcccccctgctccgggaggacggcagctgtcgctccctaaactaccatctgcaacccgtaattggggtcatttacggtcccactgggtgcggcaagtctcagctgcttaggaatttgctctcatcccagttaatcaccccggctccagaaacggtattttttatagccccgcaggtggacatgatccccccctcggaactgaaagcctgggaaatgcaaatatgtgagggaaactatgctcccgggccagagggaactttcatcccccaatctggcaccctccgcccaaagtttattaaaatggcttatgatgacctgactcaggagcataactatgatgtttcagacccccggaacgtgttcgcccgtgccgctgcccacggccccatcgctatcattatggatgagtgcatggagaatctggggggtcacaaaggcgtctccaaattttttcatgcttttccctctaagctgcatgataaatttcccaagtgcaccggatacactgtcttggtggttctgcacaatatgaacccgagacgggatctaggcggcaacattgccaacctcaagatccagtccaaaatgcatataatttcccccaggatgcacccgtcccagctcaacagatttgtaaacacctacactaagggcctccccgttgcaattagtctgctcctaaaagatattgtgcaacaccatgcactccgaccttgctatgactgggtgatttataacactaccccggagcaagaggctcttcaatggagctatctccacccccgagacggactaatgcccatgtatctaaacattcaatcccacctttacagggtactggaaaagatccaccgagttctcaatgatcgagaccgatggtccagggcataccgcgcgcgaaaaaccaaataaacattcatttgtttttataaca

SEQ ID NO: 150 - DNA, 4121 bp, Unknown
  Description of Unknown: Human adenovirus 50 sequence
tataaaacgcctggtgatcagaggccgaggtatccagctcaacgacgagtcggttagctcttcgcttggtctgcgaccagacggagtcttccagatcgccggctgtgggagatcttccttcactcctcgtcaggctgtgctgactttggagagttcgtcctcgcagccccgctcgggcggcatcggaactctccagtttgtggaggagtttactccctctgtctacttcaaccccttctccggctctcctggccagtacccggacgagttcataccgaacttcgacgcaatcagcgagtcagtggatggctatgattgatgtctaatggtggcgcggctgagctagctcgactgcgacacctagaccactgccgccgctttcgctgtttcgcccgggaactcaccgagttcatctacttcgaactctccgaggagcaccctcagggtccggcccacggagtgcggattaccatcgaagggggaatagactctcgcctgcatcgcatcttctcccagcggcccgtgctgattgagcgcgaccagggaaatacaaccatctccatctactgcatctgtaaccaccccggattgcatgaaagcctttgctgtcttgtttgtgctgagtttaataaaaactgagttaagaccttcctacggactaccgcttcttcaatcaggactttacaacaccaaccagatcttccagaagacccagacccttcctcctctgatccaggactctaactctaccttaccagcaccctccactactaaccttcccgaaactaacaagcttggatctcatctgcaacaccgcctttcacgaagccttctttctgccaatactaccactcccaaaaccggaggtgagctccgcggtcttcctactgacgacccctgggtggtagcgggttttgtaacgttaggattagttgcgggtgggcttgtgctaatcctttgctacctatacacaccttgctgtgcatatttagtcatattgtgctgttggtttaagaaatgggggccatactagtcgtgcttgctttactttcgcttttgggtctgggctctgctaatctcaatcctcttgatcacaatccatgtctagacttcgacccagaaaattgcacacttacttttgcacccgacacaagccgtctctgtggagttcttattaagtgcggatgggactgcaggtccgttgaaattacacataataacaaaacatggaacaataccttatccaccacatgggagccaggagttcccgagtggtatactgtctctgtccgaggtcctgacggttccattcgcattagtaacaacactttcattttttctgaaatgtgcgatctggccatgtttatgagcaaacagtatgacctatggcctcctagcaaagagaacattgtggcattttccattgcttattgcttggtaacatgcatcatcactgctatcatttgtgtgtgcatacacttgcttatagttattcgccctagacaaagcaatgaggaaaaagagaaaatgccttaacctttttcctcataccttttctttacagcatggcttctgttacagctctaattattgccagcattgtcactgtcgctcacgggcaaacaattgtccatattaccttaggacataatcacactcttgtagggcccccaattacttcagaggttatttggaccaaacttggaagtgttgattattttgatataatttgcaacaaaactgaaccaatatttgtaatctgtaacagacaaaatctcacgttaattaatgttagcaaaatttataacggttactattatggttatgatagatccagtagccaatataaaaattacttagttcgcataactcagcccaaatcaacagtgccaactatgacaataattaaaatggctaataaagcattagaaaattttacattaccaacaacgcccaatgaaaaaaacattccaaattcaatgattgcaattattgcggcggtggcattgggaatggcactaataataatatgcatgttcctatatgcttgttgctataaaaagtttcaacataaacaggatccactactaaattttaacatttaattttttatacagatgatttccactacaatttttatcattactagccttgcagctgtaacttatggccgttcacacctaactgtacctgttggctcaacatgtacactacaaggaccccaagaaggctatgtcacttggtggagaatatatgataatggagggttcgctagaccatgtgatcagcctggtacaaaattttcatgcaacggaagagacttgaccattattaacataacattaaatgagcaaggcttctattatggaaccaactataaaaatagtttagattacaacattattgtagtgccagccaccacttctgctccccgcaaatccactttctctagcagcagtgccaaagcaagcacaattcctaaaacagcttctgctatgttaaagcttcgaaaaatcgctttaagtaattccacagcagctcccaatacaattcctaaatcaacaattggcatcattactgccgtggtagtgggattaatgattatatttttgtgcataatgtactacgcctgctgctatagaaaacatgaacaaaaaggtgatgcattactaaattttgatatttaattttttatagaattatgatattgtttcaatccaatgccactaacactatcaatgtgcagactactttaaaacatgacatggaaaaccacactacctcctatgcatacacaaatattcagcctaaatacgctatgcaactagaaatcaccatactaattgtaattggaattcttatactatctgttattctttattttatattctgccgtcaaatacccaatgttcatagaaattctaaaagacgtcccatctattctcctatgattagtcgtccccatatggctctgaatgaaatctaagatctttttttttcttttacagtatggtgaacatcaatcatgattcctagaaatttcttcttcaccatactcatctgtgctttcaatgtctgtgctactttcacagcagtagccactgcaagcccagactgtataggaccatttgcttcctatgcactttttgcctttgttacttgcatctgcgtgtgtagcatagtctgcctggttattaattttttccaactggtagactggatctttgtgcgaattgcctacctacgtcaccatcccgaataccgcaatcaaaatgttgcggcacttcttaggcttatttaaaaccatgcaggctatgctaccagttattttaattctgctactaccctgcattgccctaccttccaccgccactcgcgctacacctgaacaacttagaaaatgcaaatttcaacaaccatggtcatttcttgattgctaccatgaaaaatctgattttcccacatactggatagtgattgttggaataattaacatactttcatgtacctttttctcaatcacaatataccccacatttaattttgggtggaattctcccaatgcactgggttacccacaagagctagatgaacatatcccactacaacacatacaacaaccactagcattggtagagtatgaaaatgagccacaaccttcactgcctcctgctattagttacttcaacctaaccggcggagatgactgaaatactcaccacctccaattccgccgaggatctgcttgatatggacggccgcgcctcagaacagcgactcgcccaactacgcatccgccagcagcaggaacgcgtgaccaaagagctcagagatgtcatccaaattcaccaatgcaaaaaaggcatattttgtttggtaaaacaagccaagatatcctacgagatcaccgctactgaccatcgcctctcttacgaacttggcccccaacgacaaaaatttacatgcatggtgggaatcaaccctatagttatcacccagcaaagtggagatactaagggttgcattcactgctcttgcgattccaccgagtgcacctacaccctgctgaagaccctatgcggcctaagagacctgctacccatgaattaaaaattaataaa

SEQ ID NO: 151 - DNA, 972 bp, Unknown
  Description of Unknown: Human adenovirus 50 sequence
atgaccaagagagtccggctcagtgattccttcaaccctgtctacccctatgaagacgaaagcacctcccaacacccctttataaacccagggtttatttccccaaatggctttacacaaagcccagacggagttcttactttaaattgtttaaccccactaacaaccacaggcgggcctttacagttaaaagtgggagggggacttatagtggatgacactgatgggaccttacaagaaaacatacgtgttacagcacccattactaaaaataatcattctgtagaactatccattggaaatggattagaaacacaaaacaataaactatgtgccaaattgggaaatgggttaaaatttaacaacggtgacatttgtataaaggatagtattaacaccttatggactggaataaagcctccacctaactgtcaaatagtggaaaacactgatacaaacgatggcaaacttactttagtattagtaaaaaacggaggacttgttaatggctacgtatctctagttggtgtatcagacactgtgaaccaaatgttcacacaaaagtcagcaaccatacaattaagattatatttcgactcttctggaaatctattaactgatgaatcaaacttaaaaattccacttaaaaataaatcttctacagcaaccagtgaagctgcaaccagcagcaaagcctttatgccaagtactacagcttatccctttaacaccactactagggatagtgaaaactatattcatggaatatgttactatatgactagttatgatagaagtctagttcccttaaacatttctataatgctaaacagccgtacgatttcttccaatgttgcctatgccatacaatttgaatggaatctaaatgcaaaagaatctccagaaagcaacatagctacgctgaccacatccccctttttcttttcttatattagagaagacgacaactaa

SEQ ID NO: 152 - DNA, 126 bp, Unknown
  Description of Unknown: Human adenovirus 50 sequence
atgaccaagagagtccggctcagtgattccttcaaccctgtctacccctatgaagacgaaagcacctcccaacacccctttataaacccagggtttatttccccaaatggctttacacaaagccca

SEQ ID NO: 153 - DNA, 273 bp, Unknown
  Description of Unknown: Human adenovirus 50 sequence
gacggagttcttactttaaattgtttaaccccactaacaaccacaggcgggcctttacagttaaaagtgggagggggacttatagtggatgacactgatgggaccttacaagaaaacatacgtgttacagcacccattactaaaaataatcattctgtagaactatccattggaaatggattagaaacacaaaacaataaactatgtgccaaattgggaaatgggttaaaatttaacaacggtgacatttgtataaaggatagtattaacacc

SEQ ID NO: 154 - DNA, 570 bp, Unknown
  Description of Unknown: Human adenovirus 50 sequence
ttatggactggaataaagcctccacctaactgtcaaatagtggaaaacactgatacaaacgatggcaaacttactttagtattagtaaaaaacggaggacttgttaatggctacgtatctctagttggtgtatcagacactgtgaaccaaatgttcacacaaaagtcagcaaccatacaattaagattatatttcgactcttctggaaatctattaactgatgaatcaaacttaaaaattccacttaaaaataaatcttctacagcaaccagtgaagctgcaaccagcagcaaagcctttatgccaagtactacagcttatccctttaacaccactactagggatagtgaaaactatattcatggaatatgttactatatgactagttatgatagaagtctagttcccttaaacatttctataatgctaaacagccgtacgatttcttccaatgttgcctatgccatacaatttgaatggaatctaaatgcaaaagaatctccagaaagcaacatagctacgctgaccacatccccctttttcttttcttatattagagaagacgacaac

SEQ ID NO: 155 - DNA, 1683 bp, Unknown
  Description of Unknown: Human adenovirus 50 sequence
atgaggcgaaccgtgctaggcggagcggtggtgtatccggagggtcctcctccttcgtacgagagcgtgatgcagcaggcggcggcggcggcgatgcagccaccactggaggctccctttgtaccccctcggtacctggcacctacggaggggagaaacagcattcgttactcggagctggcaccattgtatgataccacccggttgtatttggtggacaacaagtccgcggacatcgcctcactgaactatcagaacgaccacagcaacttcctcaccacggtggtgcaaaacaatgactttacccccacggaggccagcacccagaccatcaactttgacgagcggtcgcgatggggcggtcagctgaagactatcatgcacaccaacatgcccaacgtgaacgagtacatgtttagcaacaagttcaaagctcgggtgatggtgtctagaaaggctcctgaaggtgtcacagtagatgacaattatgatcacaagcaggatattttggaatatgagtggtttgagtttactctaccggaagggaacttctcagccacaatgaccattgacctaatgaacaatgccatcattgataattaccttgaagtgggcagacagaatggagtgttggagagtgacattggtgttaaatttgacaccaggaactttagactgggttgggatccggaaactaagttgattatgcctggggtttacacctatgaggcattccatcctgacattgtattgttgcctggttgcggagttgactttactgaaagtcgccttagtaacttgcttggtatcaggaaaagacacccattccaggagggttttaagatcttgtatgaggatcttgaagggggtaatatcccggccctgttggatgtagaagcctataagaacagtaagaaagaacgagaagccaaaacagaagccgctaaagctgctgctattgctaaagccaacatagttgtcagcgaccctgtaagggtggctaatgccgaagaagtcagaggagacaactatacagcttcatctgttgcaactgaagaatcgctattggctgctgtggccgaaactacagagaccaaactcactattaaacctgtagaaaaagacagcaagagtagaagttacaatgtcttggaagataaagtgaatacagcctaccgcagctggtacctgtcctacaactatggtgaccctgaaaaaggagtccgttcctggacactgctcaccacctcggatgtcacctgtggagcagagcaggtgtactggtcgctcccagacatgatgcaggaccctgtcacattccgttccacgagacaagtcagcaactatccagtggtaggtgcagagctcatgccggtcttctcaaagagtttctacaacgagcaagccgtgtactcccagcagcttcgccagtccacctcgctcacgcacgtcttcaaccgcttccctgagaaccagatcctcatccgcccgccagcgcccaccattaccaccgtcagtgaaaacgttcctgctctcacagatcacgggaccctgccgttgcgcagcagtatccggggagtccagcgcgtgaccgttactgacgccagacgccgcacctgcccctacgtctacaaggccctgggcatagtcgcgccgcgcgtcctttcaagccgcactttctaa

SEQ ID NO: 156 - DNA, 2823 bp, Unknown
  Description of Unknown: Human adenovirus 50 sequence
atggccaccccatcgatgctgccccagtgggcatacatgcacatcgccggacaggatgcttcggagtacctgagtccgggtctggtgcagttcgcccgcgccacagacacctacttcaatctggggaacaagtttaggaaccccaccgtggcgcccacccatgatgtgaccaccgaccgcagtcagcggctgatgctgcgctttgtgcccgttgaccgggaagacaatacctacgcatacaaagttcgatacaccttggctgtgggcgacaacagagtgctggatatggccagcactttctttgacattcggggtgtgttggatagaggtcctagcttcaagccatattctggcactgcttacaactcattggcccctaagggcgctcccaatacatctcagtggcttaataagggagatgaagaggatggggaagacgaccaacaagctacatacacttttggcaatgcgccagtaaaagccgaagctgaaattacaaaagaaggactgccaataggtttggaagttccatctgaaggtggccctaaacccatttatgctgataaactgtatcagccagaacctcaggtgggagaggaatcttggactgatacggatggcacagatgaaaaatatggaggcagagcacttaaacctgaaactaaaatgaaaccctgctacgggtctttcgctaaacctactaatgttaaaggcgggcaggcaaaagtgaagaaagaagaagaaggcaaggttgaatatgacattgacatgaactttttcgacctaagatcacaaatgactggcctcaagcctaaaattgtaatgtatgcagaaaatgtggatctagaaactcctgacactcatgtggtgtacaaacctggagcttcagatgctagctctcatgcaaaccttggtcaacagtccatgcccaatagacctaactatattggcttcagggacaacttcatcggactcatgtactacaacagtactggcaacatgggagtgctggctggacaagcgtctcagctaaatgcagtggttgacttgcaagacagaaacacagaattgtcatatcaactcttgcttgattctctgggggacagaaccagatatttcagtatgtggaatcaagcagtggatagctatgacccagatgtgcgtgttattgagaaccatggtgtggaagatgaacttcctaactattgttttccattggatggtgtaggtccgcgaatagacagttacaagggaattgagacaaatggtgatgaaaccactacttggaaagatttagagccaaagggcataagtgaaattgctaagggaaatccgtttgccatggaaattaacctccaagctaatctctggagaagttttctttattccaatgtggctctgtatctcccagactcctacaaatacaccccagccaatgtcactcttccaactaacaccaacacttatgactacatgaatgggcgggtggttcccccatccctggtggatacctacgtaaacattggcgccagatggtctttggatgccatggacaatgtcaacccctttaaccatcaccgcaacgctggcctgcgataccggtccatgcttttgggcaatggtcgttacgtgcctttccacattcaagtgcctcagaaattctttgctgtgaagaacctgctgcttctacccggttcttacacctacgagtggaacttcagaaaggatgtgaacatggtcctgcagagttcccttggtaatgatctccgggtcgatggtgccagcataagttttaccagcatcaatctctatgccaccttcttccccatggcccacaacactgcctccacccttgaagccatgctgcgcaatgacaccaatgatcaatcattcaatgactacctttctgctgccaacatgctctaccccatcccggccaacgctaccaacgttcccatctccattccctctcgcaactgggccgccttcagaggctggtccttcaccagactcaaaaccaaggagactccctctttgggatcagggttcgatccctactttgtttactctggttctataccctacctggatggtaccttctaccttaaccacactttcaagaaagtctccatcatgtttgactcttcagtgagctggcctggtaatgacagattgctaagtccaaatgagttcgaaatcaagcgcacagttgatggggaaggctacaatgtggcccaatgtaacatgaccaaagactggttcctggtccagatgcttgccaactacaacattggataccagggcttctacgttcctgagggttacaaggatcgcatgtactccttcttcagaaacttccagcccatgagtagacaggtggttgatgagattaactacaaagactataaagctgtcgccgtaccctaccagcataataactctggctttgtgggttacatggctcctaccatgcgtcagggtcaagcgtaccctgctaactacccataccccctaattggaaccactgcagtaaccagtgtcacccagaaaaaattcctgtgcgacaggaccatgtggcgcatcccattctctagcaacttcatgtccatgggtgcccttacagacctgggacagaacttgctgtatgccaactcggcccatgcgctggacatgacttttgaggtggatcccatggatgagcccaccctgctttatcttcttttcgaagtcttcgacgtggtcagagtgcaccagccacaccgcggcgtcatcgaggccgtctacctgcgcacaccgttctcggccggcaacgccaccacataa

SEQ ID NO: 157 - protein, 323 aa, Unknown
  Description of Unknown: Human adenovirus 50 sequence
MTKRVRLSDSFNPVYPYEDESTSQHPFINPGFISPNGFTQSPDGVLTLNCLTPLTTTGGPLQLKVGGGLIVDDTDGTLQENIRVTAPITKNNHSVELSIGNGLETQNNKLCAKLGNGLKFNNGDICIKDSINTLWTGIKPPPNCQIVENTDTNDGKLTLVLVKNGGLVNGYVSLVGVSDTVNQMFTQKSATIQLRLYFDSSGNLLTDESNLKIPLKNKSSTATSEAATSSKAFMPSTTAYPFNTTTRDSENYIHGICYYMTSYDRSLVPLNISIMLNSRTISSNVAYAIQFEWNLNAKESPESNIATLTTSPFFFSYIREDDN

SEQ ID NO: 158 - protein, 91 aa, Unknown
  Description of Unknown: Human adenovirus 50 sequence
DGVLTLNCLTPLTTTGGPLQLKVGGGLIVDDTDGTLQENIRVTAPITKNNHSVELSIGNGLETQNNKLCAKLGNGLKFNNGDICIKDSINT

SEQ ID NO: 159 - protein, 190 aa, Unknown; identical to SEQ ID NO: 105
  Description of Unknown: Human adenovirus 50 sequence

SEQ ID NO: 160 - protein, 560 aa, Unknown
  Description of Unknown: Human adenovirus 50 sequence
MRRTVLGGAVVYPEGPPPSYESVMQQAAAAAMQPPLEAPFVPPRYLAPTEGRNSIRYSELAPLYDTTRLYLVDNKSADIASLNYQNDHSNFLTTVVQNNDFTPTEASTQTINFDERSRWGGQLKTIMHTNMPNVNEYMFSNKFKARVMVSRKAPEGVTVDDNYDHKQDILEYEWFEFTLPEGNFSATMTIDLMNNAIIDNYLEVGRQNGVLESDIGVKFDTRNFRLGWDPETKLIMPGVYTYEAFHPDIVLLPGCGVDFTESRLSNLLGIRKRHPFQEGFKILYEDLEGGNIPALLDVEAYKNSKKEREAKTEAAKAAAIAKANIVVSDPVRVANAEEVRGDNYTASSVATEESLLAAVAETTETKLTIKPVEKDSKSRSYNVLEDKVNTAYRSWYLSYNYGDPEKGVRSWTLLTTSDVTCGAEQVYWSLPDMMQDPVTFRSTRQVSNYPVVGAELMPVFSKSFYNEQAVYSQQLRQSTSLTHVFNRFPENQILIRPPAPTITTVSENVPALTDHGTLPLRSSIRGVQRVTVTDARRRTCPYVYKALGIVAPRVLSSRTF

SEQ ID NO: 161 - protein, 940 aa, Unknown
  Description of Unknown: Human adenovirus 50 sequence
MATPSMLPQWAYMHIAGQDASEYLSPGLVQFARATDTYFNLGNKFRNPTVAPTHDVTTDRSQRLMLRFVPVDREDNTYAYKVRYTLAVGDNRVLDMASTFFDIRGVLDRGPSFKPYSGTAYNSLAPKGAPNTSQWLNKGDEEDGEDDQQATYTFGNAPVKAEAEITKEGLPIGLEVPSEGGPKPIYADKLYQPEPQVGEESWTDTDGTDEKYGGRALKPETKMKPCYGSFAKPTNVKGGQAKVKKEEEGKVEYDIDMNFFDLRSQMTGLKPKIVMYAENVDLETPDTHVVYKPGASDASSHANLGQQSMPNRPNYIGFRDNFIGLMYYNSTGNMGVLAGQASQLNAVVDLQDRNTELSYQLLLDSLGDRTRYFSMWNQAVDSYDPDVRVIENHGVEDELPNYCFPLDGVGPRIDSYKGIETNGDETTTWKDLEPKGISEIAKGNPFAMEINLQANLWRSFLYSNVALYLPDSYKYTPANVTLPTNTNTYDYMNGRVVPPSLVDTYVNIGARWSLDAMDNVNPFNHHRNAGLRYRSMLLGNGRYVPFHIQVPQKFFAVKNLLLLPGSYTYEWNFRKDVNMVLQSSLGNDLRVDGASISFTSINLYATFFPMAHNTASTLEAMLRNDTNDQSFNDYLSAANMLYPIPANATNVPISIPSRNWAAFRGWSFTRLKTKETPSLGSGFDPYFVYSGSIPYLDGTFYLNHTFKKVSIMFDSSVSWPGNDRLLSPNEFEIKRTVDGEGYNVAQCNMTKDWFLVQMLANYNIGYQGFYVPEGYKDRMYSFFRNFQPMSRQVVDEINYKDYKAVAVPYQHNNSGFVGYMAPTMRQGQAYPANYPYPLIGTTAVTSVTQKKFLCDRTMWRIPFSSNFMSMGALTDLGQNLLYANSAHALDMTFEVDPMDEPTLLYLLFEVFDVVRVHQPHRGVIEAVYLRTPFSAGNATT

SEQ ID NO: 162 - protein, 42 aa, Unknown; identical to SEQ ID NO: 36
  Description of Unknown: Human adenovirus 50 sequence

SEQ ID NO: 163 - DNA, 103 bp, Human adenovirus 5
catcatcaataatataccttattttggattgaagccaatatgataatgagggggtggagtttgtgacgtggcgcggggcgtgggaacggggcgggtgacgtag

SEQ ID NO: 164 - DNA, 103 bp, Human adenovirus 5
ctacgtcacccgccccgttcccacgccccgcgccacgtcacaaactccaccccctcattatcatattggcttcaatccaaaataaggtatattattgatgatg

SEQ ID NO: 165 - DNA, 376 bp, Human adenovirus 5
tagtgtggcggaagtgtgatgttgcaagtgtggcggaacacatgtaagcgacggatgtggcaaaagtgacgtttttggtgtgcgccggtgtacacaggaagtgacaattttcgcgcggttttaggcggatgttgtagtaaatttgggcgtaaccgagtaagatttggccattttcgcgggaaaactgaataagaggaagtgaaatctgaataattttgtgttactcatagcgcgtaatatttgtctagggccgcggggactttgaccgtttacgtggagactcgcccaggtgtttttctcaggtgttttccgcgttccgggtcaaagttggcgttttattattatagtcagctgacgtgtagtgtatttatacccg

SEQ ID NO: 166 - DNA, 3030 bp, Human adenovirus 5
gtgagttcctcaagaggccactcttgagtgccagcgagtagagttttctcctccgagccgctccgacaccgggactgaaaatgagacatattatctgccacggaggtgttattaccgaagaaatggccgccagtcttttggaccagctgatcgaagaggtactggctgataatcttccacctcctagccattttgaaccacctacccttcacgaactgtatgatttagacgtgacggcccccgaagatcccaacgaggaggcggtttcgcagatttttcccgactctgtaatgttggcggtgcaggaagggattgacttactcacttttccgccggcgcccggttctccggagccgcctcacctttcccggcagcccgagcagccggagcagagagccttgggtccggtttctatgccaaaccttgtaccggaggtgatcgatcttacctgccacgaggctggctttccacccagtgacgacgaggatgaagagggtgaggagtttgtgttagattatgtggagcaccccgggcacggttgcaggtcttgtcattatcaccggaggaatacgggggacccagatattatgtgttcgctttgctatatgaggacctgtggcatgtttgtctacagtaagtgaaaattatgggcagtgggtgatagagtggtgggtttggtgtggtaattttttttttaatttttacagttttgtggtttaaagaattttgtattgtgatttttttaaaaggtcctgtgtctgaacctgagcctgagcccgagccagaaccggagcctgcaagacctacccgccgtcctaaaatggcgcctgctatcctgagacgcccgacatcacctgtgtctagagaatgcaatagtagtacggatagctgtgactccggtccttctaacacacctcctgagatacacccggtggtcccgctgtgccccattaaaccagttgccgtgagagttggtgggcgtcgccaggctgtggaatgtatcgaggacttgcttaacgagcctgggcaacctttggacttgagctgtaaacgccccaggccataaggtgtaaacctgtgattgcgtgtgtggttaacgcctttgtttgctgaatgagttgatgtaagtttaataaagggtgagataatgtttaacttgcatggcgtgttaaatggggcggggcttaaagggtatataatgcgccgtgggctaatcttggttacatctgacctcatggaggcttgggagtgtttggaagatttttctgctgtgcgtaacttgctggaacagagctctaacagtacctcttggttttggaggtttctgtggggctcatcccaggcaaagttagtctgcagaattaaggaggattacaagtgggaatttgaagagcttttgaaatcctgtggtgagctgtttgattctttgaatctgggtcaccaggcgcttttccaagagaaggtcatcaagactttggatttttccacaccggggcgcgctgcggctgctgttgcttttttgagttttataaaggataaatggagcgaagaaacccatctgagcggggggtacctgctggattttctggccatgcatctgtggagagcggttgtgagacacaagaatcgcctgctactgttgtcttccgtccgcccggcgataataccgacggaggagcagcagcagcagcaggaggaagccaggcggcggcggcaggagcagagcccatggaacccgagagccggcctggaccctcgggaatgaatgttgtacaggtggctgaactgtatccagaactgagacgcattttgacaattacagaggatgggcaggggctaaagggggtaaagagggagcggggggcttgtgaggctacagaggaggctaggaatctagcttttagcttaatgaccagacaccgtcctgagtgtattacttttcaacagatcaaggataattgcgctaatgagcttgatctgctggcgcagaagtattccatagagcagctgaccacttactggctgcagccaggggatgattttgaggaggctattagggtatatgcaaaggtggcacttaggccagattgcaagtacaagatcagcaaacttgtaaatatcaggaattgttgctacatttctgggaacggggccgaggtggagatagatacggaggatagggtggcctttagatgtagcatgataaatatgtggccgggggtgcttggcatggacggggtggttattatgaatgtaaggtttactggccccaattttagcggtacggttttcctggccaataccaaccttatcctacacggtgtaagcttctatgggtttaacaatacctgtgtggaagcctggaccgatgtaagggttcggggctgtgccttttactgctgctggaagggggtggtgtgtcgccccaaaagcagggcttcaattaagaaatgcctctttgaaaggtgtaccttgggtatcctgtctgagggtaactccagggtgcgccacaatgtggcctccgactgtggttgcttcatgctagtgaaaagcgtggctgtgattaagcataacatggtatgtggcaactgcgaggacagggcctctcagatgctgacctgctcggacggcaactgtcacctgctgaagaccattcacgtagccagccactctcgcaaggcctggccagtgtttgagcataacatactgacccgctgttccttgcatttgggtaacaggaggggggtgttcctaccttaccaatgcaatttgagtcacactaagatattgcttgagcccgagagcatgtccaaggtgaacctgaacggggtgtttgacatgaccatgaagatctggaaggtgctgaggtacgatgagacccgcaccaggtgcagaccctgcgagtgtggcggtaaacatattaggaaccagcctgtgatgctggatgtgaccgaggagctgaggcccgatcacttggtgctggcctgcacccgcgctgagtttggctctagcgatgaagatacagattga

SEQ ID NO: 167 - DNA, 19942 bp, Human adenovirus 5
ttatttaggggttttgcgcgcgcggtaggcccgggaccagcggtctcggtcgttgagggtcctgtgtattttttccaggacgtggtaaaggtgactctggatgttcagatacatgggcataagcccgtctctggggtggaggtagcaccactgcagagcttcatgctgcggggtggtgttgtagatgatccagtcgtagcaggagcgctgggcgtggtgcctaaaaatgtctttcagtagcaagctgattgccaggggcaggcccttggtgtaagtgtttacaaagcggttaagctgggatgggtgcatacgtggggatatgagatgcatcttggactgtatttttaggttggctatgttcccagccatatccctccggggattcatgttgtgcagaaccaccagcacagtgtatccggtgcacttgggaaatttgtcatgtagcttagaaggaaatgcgtggaagaacttggagacgcccttgtgacctccaagattttccatgcattcgtccataatgatggcaatgggcccacgggcggcggcctgggcgaagatatttctgggatcactaacgtcatagttgtgttccaggatgagatcgtcataggccatttttacaaagcgcgggcggagggtgccagactgcggtataatggttccatccggcccaggggcgtagttaccctcacagatttgcatttcccacgctttgagttcagatggggggatcatgtctacctgcggggcgatgaagaaaacggtttccggggtaggggagatcagctgggaagaaagcaggttcctgagcagctgcgacttaccgcagccggtgggcccgtaaatcacacctattaccgggtgcaactggtagttaagagagctgcagctgccgtcatccctgagcaggggggccacttcgttaagcatgtccctgactcgcatgttttccctgaccaaatccgccagaaggcgctcgccgcccagcgatagcagttcttgcaaggaagcaaagtttttcaacggtttgagaccgtccgccgtaggcatgcttttgagcgtttgaccaagcagttccaggcggtcccacagctcggtcacctgctctacggcatctcgatccagcatatctcctcgtttcgcgggttggggcggctttcgctgtacggcagtagtcggtgctcgtccagacgggccagggtcatgtctttccacgggcgcagggtcctcgtcagcgtagtctgggtcacggtgaaggggtgcgctccgggctgcgcgctggccagggtgcgcttgaggctggtcctgctggtgctgaagcgctgccggtcttcgccctgcgcgtcggccaggtagcatttgaccatggtgtcatagtccagcccctccgcggcgtggcccttggcgcgcagcttgcccttggaggaggcgccgcacgaggggcagtgcagacttttgagggcgtagagcttgggcgcgagaaataccgattccggggagtaggcatccgcgccgcaggccccgcagacggtctcgcattccacgagccaggtgagctctggccgttcggggtcaaaaaccaggtttcccccatgctttttgatgcgtttcttacctctggtttccatgagccggtgtccacgctcggtgacgaaaaggctgtccgtgtccccgtatacagacttgagaggcctgtcctcgagcggtgttccgcggtcctcctcgtatagaaactcggaccactctgagacaaaggctcgcgtccaggccagcacgaaggaggctaagtgggaggggtagcggtcgttgtccactagggggtccactcgctccagggtgtgaagacacatgtcgccctcttcggcatcaaggaaggtgattggtttgtaggtgtaggccacgtgaccgggtgttcctgaaggggggctataaaagggggtgggggcgcgttcgtcctcactctcttccgcatcgctgtctgcgagggccagctgttggggtgagtactccctctgaaaagcgggcatgacttctgcgctaagattgtcagtttccaaaaacgaggaggatttgatattcacctggcccgcggtgatgcctttgagggtggccgcatccatctggtcagaaaagacaatctttttgttgtcaagcttggtggcaaacgacccgtagagggcgttggacagcaacttggcgatggagcgcagggtttggtttttgtcgcgatcggcgcgctccttggccgcgatgtttagctgcacgtattcgcgcgcaacgcaccgccattcgggaaagacggtggtgcgctcgtcgggcaccaggtgcacgcgccaaccgcggttgtgcagggtgacaaggtcaacgctggtggctacctctccgcgtaggcgctcgttggtccagcagaggcggccgcccttgcgcgagcagaatggcggtagggggtctagctgcgtctcgtccggggggtctgcgtccacggtaaagaccccgggcagcaggcgcgcgtcgaagtagtctatcttgcatccttgcaagtctagcgcctgctgccatgcgcgggcggcaagcgcgcgctcgtatgggttgagtgggggaccccatggcatggggtgggtgagcgcggaggcgtacatgccgcaaatgtcgtaaacgtagaggggctctctgagtattccaagatatgtagggtagcatcttccaccgcggatgctggcgcgcacgtaatcgtatagttcgtgcgagggagcgaggaggtcgggaccgaggttgctacgggcgggctgctctgctcggaagactatctgcctgaagatggcatgtgagttggatgatatggttggacgctggaagacgttgaagctggcgtctgtgagacctaccgcgtcacgcacgaaggaggcgtaggagtcgcgcagcttgttgaccagctcggcggtgacctgcacgtctagggcgcagtagtccagggtttccttgatgatgtcatacttatcctgtcccttttttttccacagctcgcggttgaggacaaactcttcgcggtctttccagtactcttggatcggaaacccgtcggcctccgaacggtaagagcctagcatgtagaactggttgacggcctggtaggcgcagcatcccttttctacgggtagcgcgtatgcctgcgcggccttccggagcgaggtgtgggtgagcgcaaaggtgtccctgaccatgactttgaggtactggtatttgaagtcagtgtcgtcgcatccgccctgctcccagagcaaaaagtccgtgcgctttttggaacgcggatttggcagggcgaaggtgacatcgttgaagagtatctttcccgcgcgaggcataaagttgcgtgtgatgcggaagggtcccggcacctcggaacggttgttaattacctgggcggcgagcacgatctcgtcaaagccgttgatgttgtggcccacaatgtaaagttccaagaagcgcgggatgcccttgatggaaggcaattttttaagttcctcgtaggtgagctcttcaggggagctgagcccgtgctctgaaagggcccagtctgcaagatgagggttggaagcgacgaatgagctccacaggtcacgggccattagcatttgcaggtggtcgcgaaaggtcctaaactggcgacctatggccattttttctggggtgatgcagtagaaggtaagcgggtcttgttcccagcggtcccatccaaggttcgcggctaggtctcgcgcggcagtcactagaggctcatctccgccgaacttcatgaccagcatgaagggcacgagctgcttcccaaaggcccccatccaagtataggtctctacatcgtaggtgacaaagagacgctcggtgcgaggatgcgagccgatcgggaagaactggatctcccgccaccaattggaggagtggctattgatgtggtgaaagtagaagtccctgcgacgggccgaacactcgtgctggcttttgtaaaaacgtgcgcagtactggcagcggtgcacgggctgtacatcctgcacgaggttgacctgacgaccgcgcacaaggaagcagagtgggaatttgagcccctcgcctggcgggtttggctggtggtcttctacttcggctgcttgtccttgaccgtctggctgctcgaggggagttacggtggatcggaccaccacgccgcgcgagcccaaagtccagatgtccgcgcgcggcggtcggagcttgatgacaacatcgcgcagatgggagctgtccatggtctggagctcccgcggcgtcaggtcaggcgggagctcctgcaggtttacctcgcatagacgggtcagggcgcgggctagatccaggtgatacctaatttccaggggctggttggtggcggcgtcgatggcttgcaagaggccgcatccccgcggcgcgactacggtaccgcgcggcgggcggtgggccgcgggggtgtccttggatgatgcatctaaaagcggtgacgcgggcgagcccccggaggtagggggggctccggacccgccgggagagggggcaggggcacgtcggcgccgcgcgcgggcaggagctggtgctgcgcgcgtaggttgctggcgaacgcgacgacgcggcggttgatctcctgaatctggcgcctctgcgtgaagacgacgggcccggtgagcttgagcctgaaagagagttcgacagaatcaatttcggtgtcgttgacggcggcctggcgcaaaatctcctgcacgtctcctgagttgtcttgataggcgatctcggccatgaactgctcgatctcttcctcctggagatctccgcgtccggctcgctccacggtggcggcgaggtcgttggaaatgcgggccatgagctgcgagaaggcgttgaggcctccctcgttccagacgcggctgtagaccacgcccccttcggcatcgcgggcgcgcatgaccacctgcgcgagattgagctccacgtgccgggcgaagacggcgtagtttcgcaggcgctgaaagaggtagttgagggtggtggcggtgtgttctgccacgaagaagtacataacccagcgtcgcaacgtggattcgttgatatcccccaaggcctcaaggcgctccatggcctcgtagaagtccacggcgaagttgaaaaactgggagttgcgcgccgacacggttaactcctcctccagaagacggatgagctcggcgacagtgtcgcgcacctcgcgctcaaaggctacaggggcctcttcttcttcttcaatctcctcttccataagggcctccccttcttcttcttctggcggcggtgggggaggggggacacggcggcgacgacggcgcaccgggaggcggtcgacaaagcgctcgatcatctccccgcggcgacggcgcatggtctcggtgacggcgcggccgttctcgcgggggcgcagttggaagacgccgcccgtcatgtcccggttatgggttggcggggggctgccatgcggcagggatacggcgctaacgatgcatctcaacaattgttgtgtaggtactccgccgccgagggacctgagcgagtccgcatcgaccggatcggaaaacctctcgagaaaggcgtctaaccagtcacagtcgcaaggtaggctgagcaccgtggcgggcggcagcgggcggcggtcggggttgtttctggcggaggtgctgctgatgatgtaattaaagtaggcggtcttgagacggcggatggtcgacagaagcaccatgtccttgggtccggcctgctgaatgcgcaggcggtcggccatgccccaggcttcgttttgacatcggcgcaggtctttgtagtagtcttgcatgagcctttctaccggcacttcttcttctccttcctcttgtcctgcatctcttgcatctatcgctgcggcggcggcggagtttggccgtaggtggcgccctcttcctcccatgcgtgtgaccccgaagcccctcatcggctgaagcagggctaggtcggcgacaacgcgctcggctaatatggcctgctgcacctgcgtgagggtagactggaagtcatccatgtccacaaagcggtggtatgcgcccgtgttgatggtgtaagtgcagttggccataacggaccagttaacggtctggtgacccggctgcgagagctcggtgtacctgagacgcgagtaagccctcgagtcaaatacgtagtcgttgcaagtccgcaccaggtactggtatcccaccaaaaagtgcggcggcggctggcggtagaggggccagcgtagggtggccggggctccgggggcgagatcttccaacataaggcgatgatatccgtagatgtacctggacatccaggtgatgccggcggcggtggtggaggcgcgcggaaagtcgcggacgcggttccagatgttgcgcagcggcaaaaagtgctccatggtcgggacgctctggccggtcaggcgcgcgcaatcgttgacgctctagaccgtgcaaaaggagagcctgtaagcgggcactcttccgtggtctggtggataaattcgcaagggtatcatggcggacgaccggggttcgagccccgtatccggccgtccgccgtgatccatgcggttaccgcccgcgtgtcgaacccaggtgtgcgacgtcagacaacgggggagtgctccttttggcttccttccaggcgcggcggctgctgcgctagcttttttggccactggccgcgcgcagcgtaagcggttaggctggaaagcgaaagcattaagtggctcgctccctgtagccggagggttattttccaagggttgagtcgcgggacccccggttcgagtctcggaccggccggactgcggcgaacgggggtttgcctccccgtcatgcaagaccccgcttgcaaattcctccggaaacagggacgagccccttttttgcttttcccagatgcatccggtgctgcggcagatgcgcccccctcctcagcagcggcaagagcaagagcagcggcagacatgcagggcaccctcccctcctcctaccgcgtcaggaggggcgacatccgcggttgacgcggcagcagatggtgattacgaacccccgcggcgccgggcccggcactacctggacttggaggagggcgagggcctggcgcggctaggagcgccctctcctgagcggtacccaagggtgcagctgaagcgtgatacgcgtgaggcgtacgtgccgcggcagaacctgtttcgcgaccgcgagggagaggagcccgaggagatgcgggatcgaaagttccacgcagggcgcgagctgcggcatggcctgaatcgcgagcggttgctgcgcgaggaggactttgagcccgacgcgcgaaccgggattagtcccgcgcgcgcacacgtggcggccgccgacctggtaaccgcatacgagcagacggtgaaccaggagattaactttcaaaaaagctttaacaaccacgtgcgtacgcttgtggcgcgcgaggaggtggctataggactgatgcatctgtgggactttgtaagcgcgctggagcaaaacccaaatagcaagccgctcatggcgcagctgttccttatagtgcagcacagcagggacaacgaggcattcagggatgcgctgctaaacatagtagagcccgagggccgctggctgctcgatttgataaacatcctgcagagcatagtggtgcaggagcgcagcttgagcctggctgacaaggtggccgccatcaactattccatgcttagcctgggcaagttttacgcccgcaagatataccataccccttacgttcccatagacaaggaggtaaagatcgaggggttctacatgcgcatggcgctgaaggtgcttaccttgagcgacgacctgggcgtttatcgcaacgagcgcatccacaaggccgtgagcgtgagccggcggcgcgagctcagcgaccgcgagctgatgcacagcctgcaaagggccctggctggcacgggcagcggcgatagagaggccgagtcctactttgacgcgggcgctgacctgcgctgggccccaagccgacgcgccctggaggcagctggggccggacctgggctggcggtggcacccgcgcgcgctggcaacgtcggcggcgtggaggaatatgacgaggacgatgagtacgagccagaggacggcgagtactaagcggtgatgtttctgatcagatgatgcaagacgcaacggacccggcggtgcgggcggcgctgcagagccagccgtccggccttaactccacggacgactggcgccaggtcatggaccgcatcatgtcgctgactgcgcgcaatcctgacgcgttccggcagcagccgcaggccaaccggctctccgcaattctggaagcggtggtcccggcgcgcgcaaaccccacgcacgagaaggtgctggcgatcgtaaacgcgctggccgaaaacagggccatccggcccgacgaggccggcctggtctacgacgcgctgcttcagcgcgtggctcgttacaacagcggcaacgtgcagaccaacctggaccggctggtgggggatgtgcgcgaggccgtggcgcagcgtgagcgcgcgcagcagcagggcaacctgggctccatggttgcactaaacgccttcctgagtacacagcccgccaacgtgccgcggggacaggaggactacaccaactttgtgagcgcactgcggctaatggtgactgagacaccgcaaagtgaggtgtaccagtctgggccagactattttttccagaccagtagacaaggcctgcagaccgtaaacctgagccaggctttcaaaaacttgcaggggctgtggggggtgcgggctcccacaggcgaccgcgcgaccgtgtctagcttgctgacgcccaactcgcgcctgttgctgctgctaatagcgcccttcacggacagtggcagcgtgtcccgggacacatacctaggtcacttgctgacactgtaccgcgaggccataggtcaggcgcatgtggacgagcatactttccaggagattacaagtgtcagccgcgcgctggggcaggaggacacgggcagcctggaggcaaccctaaactacctgctgaccaaccggcggcagaagatcccctcgttgcacagtttaaacagcgaggaggagcgcattttgcgctacgtgcagcagagcgtgagccttaacctgatgcgcgacggggtaacgcccagcgtggcgctggacatgaccgcgcgcaacatggaaccgggcatgtatgcctcaaaccggccgtttatcaaccgcctaatggactacttgcatcgcgcggccgccgtgaaccccgagtatttcaccaatgccatcttgaacccgcactggctaccgccccctggtttctacaccgggggattcgaggtgcccgagggtaacgatggattcctctgggacgacatagacgacagcgtgttttccccgcaaccgcagaccctgctagagttgcaacagcgcgagcaggcagaggcggcgctgcgaaaggaaagcttccgcaggccaagcagcttgtccgatctaggcgctgcggccccgcggtcagatgctagtagcccatttccaagcttgatagggtctcttaccagcactcgcaccacccgcccgcgcctgctgggcgaggaggagtacctaaacaactcgctgctgcagccgcagcgcgaaaaaaacctgcctccggcatttcccaacaacgggatagagagcctagtggacaagatgagtagatggaagacgtacgcgcaggagcacagggacgtgccaggcccgcgcccgcccacccgtcgtcaaaggcacgaccgtcagcggggtctggtgtgggaggacgatgactcggcagacgacagcagcgtcctggatttgggagggagtggcaacccgtttgcgcaccttcgccccaggctggggagaatgttttaaaaaaaaaaaagcatgatgcaaaataaaaaactcaccaaggccatggcaccgagcgttggttttcttgtattccccttagtatgcggcgcgcggcgatgtatgaggaaggtcctcctccctcctacgagagtgtggtgagcgcggcgccagtggcggcggcgctgggttctcccttcgatgctcccctggacccgccgtttgtgcctccgcggtacctgcggcctaccggggggagaaacagcatccgttactctgagttggcacccctattcgacaccacccgtgtgtacctggtggacaacaagtcaacggatgtggcatccctgaactaccagaacgaccacagcaactttctgaccacggtcattcaaaacaatgactacagcccgggggaggcaagcacacagaccatcaatcttgacgaccggtcgcactggggcggcgacctgaaaaccatcctgcataccaacatgccaaatgtgaacgagttcatgtttaccaataagtttaaggcgcgggtgatggtgtcgcgcttgcctactaaggacaatcaggtggagctgaaatacgagtgggtggagttcacgctgcccgagggcaactactccgagaccatgaccatagaccttatgaacaacgcgatcgtggagcactacttgaaagtgggcagacagaacggggttctggaaagcgacatcggggtaaagtttgacacccgcaacttcagactggggtttgaccccgtcactggtcttgtcatgcctggggtatatacaaacgaagccttccatccagacatcattttgctgccaggatgcggggtggacttcacccacagccgcctgagcaacttgttgggcatccgcaagcggcaacccttccaggagggctttaggatcacctacgatgatctggagggtggtaacattcccgcactgttggatgtggacgcctaccaggcgagcttgaaagatgacaccgaacagggcgggggtggcgcaggcggcagcaacagcagtggcagcggcgcggaagagaactccaacgcggcagccgcggcaatgcagccggtggaggacatgaacgatcatgccattcgcggcgacacctttgccacacgggctgaggagaagcgcgctgaggccgaagcagcggccgaagctgccgcccccgctgcgcaacccgaggtcgagaagcctcagaagaaaccggtgatcaaacccctgacagaggacagcaagaaacgcagttacaacctaataagcaatgacagcaccttcacccagtaccgcagctggtaccttgcatacaactacggcgaccctcagaccggaatccgctcatggaccctgctttgcactcctgacgtaacctgcggctcggagcaggtctactggtcgttgccagacatgatgcaagaccccgtgaccttccgctccacgcgccagatcagcaactttccggtggtgggcgccgagctgttgcccgtgcactccaagagcttctacaacgaccaggccgtctactcccaactcatccgccagtttacctctctgacccacgtgttcaatcgctttcccgagaaccagattttggcgcgcccgccagcccccaccatcaccaccgtcagtgaaaacgttcctgctctcacagatcacgggacgctaccgctgcgcaacagcatcggaggagtccagcgagtgaccattactgacgccagacgccgcacctgcccctacgtttacaaggccctgggcatagtctcgccgcgcgtcctatcgagccgcactttttgagcaagcatgtccatccttatatcgcccagcaataacacaggctggggcctgcgcttcccaagcaagatgtttggcggggccaagaagcgctccgaccaacacccagtgcgcgtgcgcgggcactaccgcgcgccctggggcgcgcacaaacgcggccgcactgggcgcaccaccgtcgatgacgccatcgacgcggtggtggaggaggcgcgcaactacacgcccacgccgccaccagtgtccacagtggacgcggccattcagaccgtggtgcgcggagcccggcgctatgctaaaatgaagagacggcggaggcgcgtagcacgtcgccaccgccgccgacccggcactgccgcccaacgcgcggcggcggccctgcttaaccgcgcacgtcgcaccggccgacgggcggccatgcgggccgctcgaaggctggccgcgggtattgtcactgtgccccccaggtccaggcgacgagcggccgccgcagcagccgcggccattagtgctatgactcagggtcgcaggggcaacgtgtattgggtgcgcgactcggttagcggcctgcgcgtgcccgtgcgcacccgccccccgcgcaactagattgcaagaaaaaactacttagactcgtactgttgtatgtatccagcggcggcggcgcgcaacgaagctatgtccaagcgcaaaatcaaagaagagatgctccaggtcatcgcgccggagatctatggccccccgaagaaggaagagcaggattacaagccccgaaagctaaagcgggtcaaaaagaaaaagaaagatgatgatgatgaacttgacgacgaggtggaactgctgcacgctaccgcgcccaggcgacgggtacagtggaaaggtcgacgcgtaaaacgtgttttgcgacccggcaccaccgtagtctttacgcccggtgagcgctccacccgcacctacaagcgcgtgtatgatgaggtgtacggcgacgaggacctgcttgagcaggccaacgagcgcctcggggagtttgcctacggaaagcggcataaggacatgctggcgttgccgctggacgagggcaacccaacacctagcctaaagcccgtaacactgcagcaggtgctgcccgcgcttgcaccgtccgaagaaaagcgcggcctaaagcgcgagtctggtgacttggcacccaccgtgcagctgatggtacccaagcgccagcgactggaagatgtcttggaaaaaatgaccgtggaacctgggctggagcccgaggtccgcgtgcggccaatcaagcaggtggcgccgggactgggcgtgcagaccgtggacgttcagatacccactaccagtagcaccagtattgccaccgccacagagggcatggagacacaaacgtccccggttgcctcagcggtggcggatgccgcggtgcaggcggtcgctgcggccgcgtccaagacctctacggaggtgcaaacggacccgtggatgtttcgcgtttcagccccccggcgcccgcgcggttcgaggaagtacggcgccgccagcgcgctactgcccgaatatgccctacatccttccattgcgcctacccccggctatcgtggctacacctaccgccccagaagacgagcaactacccgacgccgaaccaccactggaacccgccgccgccgtcgccgtcgccagcccgtgctggccccgatttccgtgcgcagggtggctcgcgaaggaggcaggaccctggtgctgccaacagcgcgctaccaccccagcatcgtttaaaagccggtctttgtggttcttgcagatatggccctcacctgccgcctccgtttcccggtgccgggattccgaggaagaatgcaccgtaggaggggcatggccggccacggcctgacgggcggcatgcgtcgtgcgcaccaccggcggcggcgcgcgtcgcaccgtcgcatgcgcggcggtatcctgcccctccttattccactgatcgccgcggcgattggcgccgtgcccggaattgcatccgtggccttgcaggcgcagagacactgattaaaaacaagttgcatgtggaaaaatcaaaataaaaagtctggactctcacgctcgcttggtcctgtaactattttgtagaatggaagacatcaactttgcgtctctggccccgcgacacggctcgcgcccgttcatgggaaactggcaagatatcggcaccagcaatatgagcggtggcgccttcagctggggctcgctgtggagcggcattaaaaatttcggttccaccgttaagaactatggcagcaaggcctggaacagcagcacaggccagatgctgagggataagttgaaagagcaaaatttccaacaaaaggtggtagatggcctggcctctggcattagcggggtggtggacctggccaaccaggcagtgcaaaataagattaacagtaagcttgatccccgccctcccgtagaggagcctccaccggccgtggagacagtgtctccagaggggcgtggcgaaaagcgtccgcgccccgacagggaagaaactctggtgacgcaaatagacgagcctccctcgtacgaggaggcactaaagcaaggcctgcccaccacccgtcccatcgcgcccatggctaccggagtgctgggccagcacacacccgtaacgctggacctgcctccccccgccgacacccagcagaaacctgtgctgccaggcccgaccgccgttgttgtaacccgtcctagccgcgcgtccctgcgccgcgccgccagcggtccgcgatcgttgcggcccgtagccagtggcaactggcaaagcacactgaacagcatcgtgggtctgggggtgcaatccctgaagcgccgacgatgcttctgaatagctaacgtgtcgtatgtgtgtcatgtatgcgtccatgtcgccgccagaggagctgctgagccgccgcgcgcccgctttccaagatggctaccccttcgatgatgccgcagtggtcttacatgcacatctcgggccaggacgcctcggagtacctgagccccgggctggtgcagtttgcccgcgccaccgagacgtacttcagcctgaataacaagtttagaaaccccacggtggcgcctacgcacgacgtgaccacagaccggtcccagcgtttgacgctgcggttcatccctgtggaccgtgaggatactgcgtactcgtacaaggcgcggttcaccctagctgtgggtgataaccgtgtgctggacatggcttccacgtactttgacatccgcggcgtgctggacaggggccctacttttaagccctactctggcactgcctacaacgccctggctcccaagggtgccccaaatccttgcgaatgggatgaagctgctactgctcttgaaataaacctagaagaagaggacgatgacaacgaagacgaagtagacgagcaagctgagcagcaaaaaactcacgtatttgggcaggcgccttattctggtataaatattacaaaggagggtattcaaataggtgtcgaaggtcaaacacctaaatatgccgataaaacatttcaacctgaacctcaaataggagaatctcagtggtacgaaactgaaattaatcatgcagctgggagagtccttaaaaagactaccccaatgaaaccatgttacggttcatatgcaaaacccacaaatgaaaatggagggcaaggcattcttgtaaagcaacaaaatggaaagctagaaagtcaagtggaaatgcaatttttctcaactactgaggcgaccgcaggcaatggtgataacttgactcctaaagtggtattgtacagtgaagatgtagatatagaaaccccagacactcatatttcttacatgcccactattaaggaaggtaactcacgagaactaatgggccaacaatctatgcccaacaggcctaattacattgcttttagggacaattttattggtctaatgtattacaacagcacgggtaatatgggtgttctggcgggccaagcatcgcagttgaatgctgttgtagatttgcaagacagaaacacagagctttcataccagcttttgcttgattccattggtgatagaaccaggtacttttctatgtggaatcaggctgttgacagctatgatccagatgttagaattattgaaaatcatggaactgaagatgaacttccaaattactgctttccactgggaggtgtgattaatacagagactcttaccaaggtaaaacctaaaacaggtcaggaaaatggatgggaaaaagatgctacagaattttcagataaaaatgaaataagagttggaaataattttgccatggaaatcaatctaaatgccaacctgtggagaaatttcctgtactccaacatagcgctgtatttgcccgacaagctaaagtacagtccttccaacgtaaaaatttctgataacccaaacacctacgactacatgaacaagcgagtggtggctcccgggttagtggactgctacattaaccttggagcacgctggtcccttgactatatggacaacgtcaacccatttaaccaccaccgcaatgctggcctgcgctaccgctcaatgttgctgggcaatggtcgctatgtgcccttccacatccaggtgcctcagaagttctttgccattaaaaacctccttctcctgccgggctcatacacctacgagtggaacttcaggaaggatgttaacatggttctgcagagctccctaggaaatgacctaagggttgacggagccagcattaagtttgatagcatttgcctttacgccaccttcttccccatggcccacaacaccgcctccacgcttgaggccatgcttagaaacgacaccaacgaccagtcctttaacgactatctctccgccgccaacatgctctaccctatacccgccaacgctaccaacgtgcccatatccatcccctcccgcaactgggcggctttccgcggctgggccttcacgcgccttaagactaaggaaaccccatcactgggctcgggctacgacccttattacacctactctggctctataccctacctagatggaaccttttacctcaaccacacctttaagaaggtggccattacctttgactcttctgtcagctggcctggcaatgaccgcctgcttacccccaacgagtttgaaattaagcgctcagttgacggggagggttacaacgttgcccagtgtaacatgaccaaagactggttcctggtacaaatgctagctaactacaacattggctaccagggcttctatatcccagagagctacaaggaccgcatgtactccttctttagaaacttccagcccatgagccgtcaggtggtggatgatactaaatacaaggactaccaacaggtgggcatcctacaccaacacaacaactctggatttgttggctaccttgcccccaccatgcgcgaaggacaggcctaccctgctaacttcccctatccgcttataggcaagaccgcagttgacagcattacccagaaaaagtttctttgcgatcgcaccctttggcgcatcccattctccagtaactttatgtccatgggcgcactcacagacctgggccaaaaccttctctacgccaactccgcccacgcgctagacatgacttttgaggtggatcccatggacgagcccacccttctttatgttttgtttgaagtctttgacgtggtccgtgtgcaccggccgcaccgcggcgtcatcgaaaccgtgtacctgcgcacgcccttctcggccggcaacgccacaacataaagaagcaagcaacatcaacaacagctgccgccatgggctccagtgagcaggaactgaaagccattgtcaaagatcttggttgtgggccatattttttgggcacctatgacaagcgctttccaggctttgtttctccacacaagctcgcctgcgccatagtcaatacggccggtcgcgagactgggggcgtacactggatggcctttgcctggaacccgcactcaaaaacatgctacctctttgagccctttggcttttctgaccagcgactcaagcaggtttaccagtttgagtacgagtcactcctgcgccgtagcgccattgcttcttcccccgaccgctgtataacgctggaaaagtccacccaaagcgtacaggggcccaactcggccgcctgtggactattctgctgcatgtttctccacgcctttgccaactggccccaaactcccatggatcacaaccccaccatgaaccttattaccggggtacccaactccatgctcaacagtccccaggtacagcccaccctgcgtcgcaaccaggaacagctctacagcttcctggagcgccactcgccctacttccgcagccacagtgcgcagattaggagcgccacttctttttgtcacttgaaaaacatgtaaaaataatgtactagagacactttcaataaaggcaaatgcttttatttgtacactctcgggtgattatttacccccacccttgccgtctgcgccgtttaaaaatcaaaggggttctgccgcgcatcgctatgcgccactggcagggacacgttgcgatactggtgtttagtgctccacttaaactcaggcacaaccatccgcggcagctcggtgaagttttcactccacaggctgcgcaccatcaccaacgcgtttagcaggtcgggcgccgatatcttgaagtcgcagttggggcctccgccctgcgcgcgcgagttgcgatacacagggttgcagcactggaacactatcagcgccgggtggtgcacgctggccagcacgctcttgtcggagatcagatccgcgtccaggtcctccgcgttgctcagggcgaacggagtcaactttggtagctgccttcccaaaaagggcgcgtgcccaggctttgagttgcactcgcaccgtagtggcatcaaaaggtgaccgtgcccggtctgggcgttaggatacagcgcctgcataaaagccttgatctgcttaaaagccacctgagcctttgcgccttcagagaagaacatgccgcaagacttgccggaaaactgattggccggacaggccgcgtcgtgcacgcagcaccttgcgtcggtgttggagatctgcaccacatttcggccccaccggttcttcacgatcttggccttgctagactgctccttcagcgcgcgctgcccgttttcgctcgtcacatccatttcaatcacgtgctccttatttatcataatgcttccgtgtagacacttaagctcgccttcgatctcagcgcagcggtgcagccacaacgcgcagcccgtgggctcgtgatgcttgtaggtcacctctgcaaacgactgcaggtacgcctgcaggaatcgccccatcatcgtcacaaaggtcttgttgctggtgaaggtcagctgcaacccgcggtgctcctcgttcagccaggtcttgcatacggccgccagagcttccacttggtcaggcagtagtttgaagttcgcctttagatcgttatccacgtggtacttgtccatcagcgcgcgcgcagcctccatgcccttctcccacgcagacacgatcggcacactcagcgggttcatcaccgtaatttcactttccgcttcgctgggctcttcctcttcctcttgcgtccgcataccacgcgccactgggtcgtcttcattcagccgccgcactgtgcgcttacctcctttgccatgcttgattagcaccggtgggttgctgaaacccaccatttgtagcgccacatcttctctttcttcctcgctgtccacgattacctctggtgatggcgggcgctcgggcttgggagaagggcgcttctttttcttcttgggcgcaatggccaaatccgccgccgaggtcgatggccgcgggctgggtgtgcgcggcaccagcgcgtcttgtgatgagtcttcctcgtcctcggactcgatacgccgcctcatccgcttttttgggggcgcccggggaggcggcggcgacggggacggggacgacacgtcctccatggttgggggacgtcgcgccgcaccgcgtccgcgctcgggggtggtttcgcgctgctcctcttcccgactggccat

SEQ ID NO: 168 - DNA, 3666 bp, Human adenovirus 5
atgagcaaggaaattcccacgccctacatgtggagttaccagccacaaatgggacttgcggctggagctgcccaagactactcaacccgaataaactacatgagcgcgggaccccacatgatatcccgggtcaacggaatccgcgcccaccgaaaccgaattctcttggaacaggcggctattaccaccacacctcgtaataaccttaatccccgtagttggcccgctgccctggtgtaccaggaaagtcccgctcccaccactgtggtacttcccagagacgcccaggccgaagttcagatgactaactcaggggcgcagcttgcgggcggctttcgtcacagggtgcggtcgcccgggcagggtataactcacctgacaatcagagggcgaggtattcagctcaacgacgagtcggtgagctcctcgcttggtctccgtccggacgggacatttcagatcggcggcgccggccgtccttcattcacgcctcgtcaggcaatcctaactctgcagacctcgtcctctgagccgcgctctggaggcattggaactctgcaatttattgaggagtttgtgccatcggtctactttaaccccttctcgggacctcccggccactatccggatcaatttattcctaactttgacgcggtaaaggactcggcggacggctacgactgaatgttaagtggagaggcagagcaactgcgcctgaaacacctggtccactgtcgccgccacaagtgctttgcccgcgactccggtgagttttgctactttgaattgcccgaggatcatatcgagggcccggcgcacggcgtccggcttaccgcccagggagagcttgcccgtagcctgattcgggagtttacccagcgccccctgctagttgagcgggacaggggaccctgtgttctcactgtgatttgcaactgtcctaaccttggattacatcaagatctttgttgccatctctgtgctgagtataataaatacagaaattaaaatatactggggctcctatcgccatcctgtaaacgccaccgtcttcacccgcccaagcaaaccaaggcgaaccttacctggtacttttaacatctctccctctgtgatttacaacagtttcaacccagacggagtgagtctacgagagaacctctccgagctcagctactccatcagaaaaaacaccaccctccttacctgccgggaacgtacgagtgcgtcaccggccgctgcaccacacctaccgcctgaccgtaaaccagactttttccggacagacctcaataactctgtttaccagaacaggaggtgagcttagaaaacccttagggtattaggccaaaggcgcagctactgtggggtttatgaacaattcaagcaactctacgggctattctaattcaggtttctctagaatcggggttggggttattctctgtcttgtgattctctttattcttatactaacgcttctctgcctaaggctcgccgcctgctgtgtgcacatttgcatttattgtcagctttttaaacgctggggtcgccacccaagatgattaggtacataatcctaggtttactcacccttgcgtcagcccacggtaccacccaaaaggtggattttaaggagccagcctgtaatgttacattcgcagctgaagctaatgagtgcaccactcttataaaatgcaccacagaacatgaaaagctgcttattcgccacaaaaacaaaattggcaagtatgctgtttatgctatttggcagccaggtgacactacagagtataatgttacagttttccagggtaaaagtcataaaacttttatgtatacttttccattttatgaaatgtgcgacattaccatgtacatgagcaaacagtataagttgtggcccccacaaaattgtgtggaaaacactggcactttctgctgcactgctatgctaattacagtgctcgctttggtctgtaccctactctatattaaatacaaaagcagacgcagctttattgaggaaaagaaaatgccttaatttactaagttacaaagctaatgtcaccactaactgctttactcgctgcttgcaaaacaaattcaaaaagttagcattataattagaataggatttaaaccccccggtcatttcctgctcaataccattcccctgaacaattgactctatgtgggatatgctccagcgctacaaccttgaagtcaggcttcctggatgtcagcatctgactttggccagcacctgtcccgcggatttgttccagtccaactacagcgacccaccctaacagagatgaccaacacaaccaacgcggccgccgctaccggacttacatctaccacaaatacaccccaagtttctgcctttgtcaataactgggataacttgggcatgtggtggttctccatagcgcttatgtttgtatgccttattattatgtggctcatctgctgcctaaagcgcaaacgcgcccgaccacccatctatagtcccatcattgtgctacacccaaacaatgatggaatccatagattggacggactgaaacacatgttcttttctcttacagtatgattaaatgagacatgattcctcgagtttttatattactgacccttgttgcgcttttttgtgcgtgctccacattggctgcggtttctcacatcgaagtagactgcattccagccttcacagtctatttgctttacggatttgtcaccctcacgctcatctgcagcctcatcactgtggtcatcgcctttatccagtgcattgactgggtctgtgtgcgctttgcatatctcagacaccatccccagtacagggacaggactatagctgagcttcttagaattctttaattatgaaatttactgtgacttttctgctgattatttgcaccctatctgcgttttgttccccgacctccaagcctcaaagacatatatcatgcagattcactcgtatatggaatattccaagttgctacaatgaaaaaagcgatctttccgaagcctggttatatgcaatcatctctgttatggtgttctgcagtaccatcttagccctagctatatatccctaccttgacattggctggaaacgaatagatgccatgaaccacccaactttccccgcgcccgctatgcttccactgcaacaagttgttgccggcggctttgtcccagccaatcagcctcgccccacttctcccacccccactgaaatcagctactttaatctaacaggaggagatgactgacaccctagatctagaaatggacggaattattacagagcagcgcctgctagaaagacgcagggcagcggccgagcaacagcgcatgaatcaagagctccaagacatggttaacttgcaccagtgcaaaaggggtatcttttgtctggtaaagcaggccaaagtcacctacgacagtaataccaccggacaccgccttagctacaagttgccaaccaagcgtcagaaattggtggtcatggtgggagaaaagcccattaccataactcagcactcggtagaaaccgaaggctgcattcactcaccttgtcaaggacctgaggatctctgcacccttattaagaccctgtgcggtctcaaagatcttattccctttaactaa

SEQ ID NO: 169 - DNA, 1746 bp, Human adenovirus 5
atgaagcgcgcaagaccgtctgaagataccttcaaccccgtgtatccatatgacacggaaaccggtcctccaactgtgccttttcttactcctccctttgtatcccccaatgggtttcaagagagtccccctggggtactctctttgcgcctatccgaacctctagttacctccaatggcatgcttgcgctcaaaatgggcaacggcctctctctggacgaggccggcaaccttacctcccaaaatgtaaccactgtgagcccacctctcaaaaaaaccaagtcaaacataaacctggaaatatctgcacccctcacagttacctcagaagccctaactgtggctgccgccgcacctctaatggtcgcgggcaacacactcaccatgcaatcacaggccccgctaaccgtgcacgactccaaacttagcattgccacccaaggacccctcacagtgtcagaaggaaagctagccctgcaaacatcaggccccctcaccaccaccgatagcagtacccttactatcactgcctcaccccctctaactactgccactggtagcttgggcattgacttgaaagagcccatttatacacaaaatggaaaactaggactaaagtacggggctcctttgcatgtaacagacgacctaaacactttgaccgtagcaactggtccaggtgtgactattaataatacttccttgcaaactaaagttactggagccttgggttttgattcacaaggcaatatgcaacttaatgtagcaggaggactaaggattgattctcaaaacagacgccttatacttgatgttagttatccgtttgatgctcaaaaccaactaaatctaagactaggacagggccctctttttataaactcagcccacaacttggatattaactacaacaaaggcctttacttgtttacagcttcaaacaattccaaaaagcttgaggttaacctaagcactgccaaggggttgatgtttgacgctacagccatagccattaatgcaggagatgggcttgaatttggttcacctaatgcaccaaacacaaatcccctcaaaacaaaaattggccatggcctagaatttgattcaaacaaggctatggttcctaaactaggaactggccttagttttgacagcacaggtgccattacagtaggaaacaaaaataatgataagctaactttgtggaccacaccagctccatctcctaactgtagactaaatgcagagaaagatgctaaactcactttggtcttaacaaaatgtggcagtcaaatacttgctacagtttcagttttggctgttaaaggcagtttggctccaatatctggaacagttcaaagtgctcatcttattataagatttgacgaaaatggagtgctactaaacaattccttcctggacccagaatattggaactttagaaatggagatcttactgaaggcacagcctatacaaacgctgttggatttatgcctaacctatcagcttatccaaaatctcacggtaaaactgccaaaagtaacattgtcagtcaagtttacttaaacggagacaaaactaaacctgtaacactaaccattacactaaacggtacacaggaaacaggagacacaactccaagtgcatactctatgtcattttcatgggactggtctggccacaactacattaatgaaatatttgccacatcctcttacactttttcatacattgcccaagaataa

SEQ ID NO: 170 - DNA, 129 bp, Human adenovirus 5
atgaagcgcgcaagaccgtctgaagataccttcaaccccgtgtatccatatgacacggaaaccggtcctccaactgtgccttttcttactcctccctttgtatcccccaatgggtttcaagagagtccc

SEQ ID NO: 171 - DNA, 1071 bp, Human adenovirus 5
cctggggtactctctttgcgcctatccgaacctctagttacctccaatggcatgcttgcgctcaaaatgggcaacggcctctctctggacgaggccggcaaccttacctcccaaaatgtaaccactgtgagcccacctctcaaaaaaaccaagtcaaacataaacctggaaatatctgcacccctcacagttacctcagaagccctaactgtggctgccgccgcacctctaatggtcgcgggcaacacactcaccatgcaatcacaggccccgctaaccgtgcacgactccaaacttagcattgccacccaaggacccctcacagtgtcagaaggaaagctagccctgcaaacatcaggccccctcaccaccaccgatagcagtacccttactatcactgcctcaccccctctaactactgccactggtagcttgggcattgacttgaaagagcccatttatacacaaaatggaaaactaggactaaagtacggggctcctttgcatgtaacagacgacctaaacactttgaccgtagcaactggtccaggtgtgactattaataatacttccttgcaaactaaagttactggagccttgggttttgattcacaaggcaatatgcaacttaatgtagcaggaggactaaggattgattctcaaaacagacgccttatacttgatgttagttatccgtttgatgctcaaaaccaactaaatctaagactaggacagggccctctttttataaactcagcccacaacttggatattaactacaacaaaggcctttacttgtttacagcttcaaacaattccaaaaagcttgaggttaacctaagcactgccaaggggttgatgtttgacgctacagccatagccattaatgcaggagatgggcttgaatttggttcacctaatgcaccaaacacaaatcccctcaaaacaaaaattggccatggcctagaatttgattcaaacaaggctatggttcctaaactaggaactggccttagttttgacagcacaggtgccattacagtaggaaacaaaaataatgataagctaact

SEQ ID NO: 172 - DNA, 543 bp, Human adenovirus 5
ttgtggaccacaccagctccatctcctaactgtagactaaatgcagagaaagatgctaaactcactttggtcttaacaaaatgtggcagtcaaatacttgctacagtttcagttttggctgttaaaggcagtttggctccaatatctggaacagttcaaagtgctcatcttattataagatttgacgaaaatggagtgctactaaacaattccttcctggacccagaatattggaactttagaaatggagatcttactgaaggcacagcctatacaaacgctgttggatttatgcctaacctatcagcttatccaaaatctcacggtaaaactgccaaaagtaacattgtcagtcaagtttacttaaacggagacaaaactaaacctgtaacactaaccattacactaaacggtacacaggaaacaggagacacaactccaagtgcatactctatgtcattttcatgggactggtctggccacaactacattaatgaaatatttgccacatcctcttacactttttcatacattgcccaagaa

SEQ ID NO: 173 - DNA, 1716 bp, Human adenovirus 5
atgcggcgcgcggcgatgtatgaggaaggtcctcctccctcctacgagagtgtggtgagcgcggcgccagtggcggcggcgctgggttctcccttcgatgctcccctggacccgccgtttgtgcctccgcggtacctgcggcctaccggggggagaaacagcatccgttactctgagttggcacccctattcgacaccacccgtgtgtacctggtggacaacaagtcaacggatgtggcatccctgaactaccagaacgaccacagcaactttctgaccacggtcattcaaaacaatgactacagcccgggggaggcaagcacacagaccatcaatcttgacgaccggtcgcactggggcggcgacctgaaaaccatcctgcataccaacatgccaaatgtgaacgagttcatgtttaccaataagtttaaggcgcgggtgatggtgtcgcgcttgcctactaaggacaatcaggtggagctgaaatacgagtgggtggagttcacgctgcccgagggcaactactccgagaccatgaccatagaccttatgaacaacgcgatcgtggagcactacttgaaagtgggcagacagaacggggttctggaaagcgacatcggggtaaagtttgacacccgcaacttcagactggggtttgaccccgtcactggtcttgtcatgcctggggtatatacaaacgaagccttccatccagacatcattttgctgccaggatgcggggtggacttcacccacagccgcctgagcaacttgttgggcatccgcaagcggcaacccttccaggagggctttaggatcacctacgatgatctggagggtggtaacattcccgcactgttggatgtggacgcctaccaggcgagcttgaaagatgacaccgaacagggcgggggtggcgcaggcggcagcaacagcagtggcagcggcgcggaagagaactccaacgcggcagccgcggcaatgcagccggtggaggacatgaacgatcatgccattcgcggcgacacctttgccacacgggctgaggagaagcgcgctgaggccgaagcagcggccgaagctgccgcccccgctgcgcaacccgaggtcgagaagcctcagaagaaaccggtgatcaaacccctgacagaggacagcaagaaacgcagttacaacctaataagcaatgacagcaccttcacccagtaccgcagctggtaccttgcatacaactacggcgaccctcagaccggaatccgctcatggaccctgctttgcactcctgacgtaacctgcggctcggagcaggtctactggtcgttgccagacatgatgcaagaccccgtgaccttccgctccacgcgccagatcagcaactttccggtggtgggcgccgagctgttgcccgtgcactccaagagcttctacaacgaccaggccgtctactcccaactcatccgccagtttacctctctgacccacgtgttcaatcgctttcccgagaaccagattttggcgcgcccgccagcccccaccatcaccaccgtcagtgaaaacgttcctgctctcacagatcacgggacgctaccgctgcgcaacagcatcggaggagtccagcgagtgaccattactgacgccagacgccgcacctgcccctacgtttacaaggccctgggcatagtctcgccgcgcgtcctatcgagccgcactttttga

SEQ ID NO: 174 - DNA, 2859 bp, Human adenovirus 5
atggctaccccttcgatgatgccgcagtggtcttacatgcacatctcgggccaggacgcctcggagtacctgagccccgggctggtgcagtttgcccgcgccaccgagacgtacttcagcctgaataacaagtttagaaaccccacggtggcgcctacgcacgacgtgaccacagaccggtcccagcgtttgacgctgcggttcatccctgtggaccgtgaggatactgcgtactcgtacaaggcgcggttcaccctagctgtgggtgataaccgtgtgctggacatggcttccacgtactttgacatccgcggcgtgctggacaggggccctacttttaagccctactctggcactgcctacaacgccctggctcccaagggtgccccaaatccttgcgaatgggatgaagctgctactgctcttgaaataaacctagaagaagaggacgatgacaacgaagacgaagtagacgagcaagctgagcagcaaaaaactcacgtatttgggcaggcgccttattctggtataaatattacaaaggagggtattcaaataggtgtcgaaggtcaaacacctaaatatgccgataaaacatttcaacctgaacctcaaataggagaatctcagtggtacgaaactgaaattaatcatgcagctgggagagtccttaaaaagactaccccaatgaaaccatgttacggttcatatgcaaaacccacaaatgaaaatggagggcaaggcattcttgtaaagcaacaaaatggaaagctagaaagtcaagtggaaatgcaatttttctcaactactgaggcgaccgcaggcaatggtgataacttgactcctaaagtggtattgtacagtgaagatgtagatatagaaaccccagacactcatatttcttacatgcccactattaaggaaggtaactcacgagaactaatgggccaacaatctatgcccaacaggcctaattacattgcttttagggacaattttattggtctaatgtattacaacagcacgggtaatatgggtgttctggcgggccaagcatcgcagttgaatgctgttgtagatttgcaagacagaaacacagagctttcataccagcttttgcttgattccattggtgatagaaccaggtacttttctatgtggaatcaggctgttgacagctatgatccagatgttagaattattgaaaatcatggaactgaagatgaacttccaaattactgctttccactgggaggtgtgattaatacagagactcttaccaaggtaaaacctaaaacaggtcaggaaaatggatgggaaaaagatgctacagaattttcagataaaaatgaaataagagttggaaataattttgccatggaaatcaatctaaatgccaacctgtggagaaatttcctgtactccaacatagcgctgtatttgcccgacaagctaaagtacagtccttccaacgtaaaaatttctgataacccaaacacctacgactacatgaacaagcgagtggtggctcccgggttagtggactgctacattaaccttggagcacgctggtcccttgactatatggacaacgtcaacccatttaaccaccaccgcaatgctggcctgcgctaccgctcaatgttgctgggcaatggtcgctatgtgcccttccacatccaggtgcctcagaagttctttgccattaaaaacctccttctcctgccgggctcatacacctacgagtggaacttcaggaaggatgttaacatggttctgcagagctccctaggaaatgacctaagggttgacggagccagcattaagtttgatagcatttgcctttacgccaccttcttccccatggcccacaacaccgcctccacgcttgaggccatgcttagaaacgacaccaacgaccagtcctttaacgactatctctccgccgccaacatgctctaccctatacccgccaacgctaccaacgtgcccatatccatcccctcccgcaactgggcggctttccgcggctgggccttcacgcgccttaagactaaggaaaccccatcactgggctcgggctacgacccttattacacctactctggctctataccctacctagatggaaccttttacctcaaccacacctttaagaaggtggccattacctttgactcttctgtcagctggcctggcaatgaccgcctgcttacccccaacgagtttgaaattaagcgctcagttgacggggagggttacaacgttgcccagtgtaacatgaccaaagactggttcctggtacaaatgctagctaactacaacattggctaccagggcttctatatcccagagagctacaaggaccgcatgtactccttctttagaaacttccagcccatgagccgtcaggtggtggatgatactaaatacaaggactaccaacaggtgggcatcctacaccaacacaacaactctggatttgttggctaccttgcccccaccatgcgcgaaggacaggcctaccctgctaacttcccctatccgcttataggcaagaccgcagttgacagcattacccagaaaaagtttctttgcgatcgcaccctttggcgcatcccattctccagtaactttatgtccatgggcgcactcacagacctgggccaaaaccttctctacgccaactccgcccacgcgctagacatgacttttgaggtggatcccatggacgagcccacccttctttatgttttgtttgaagtctttgacgtggtccgtgtgcaccggccgcaccgcggcgtcatcgaaaccgtgtacctgcgcacgcccttctcggccggcaacgccacaacataa

SEQ ID NO: 175 - protein, 581 aa, Human adenovirus 5
MKRARPSEDTFNPVYPYDTETGPPTVPFLTPPFVSPNGFQESPPGVLSLRLSEPLVTSNGMLALKMGNGLSLDEAGNLTSQNVTTVSPPLKKTKSNINLEISAPLTVTSEALTVAAAAPLMVAGNTLTMQSQAPLTVHDSKLSIATQGPLTVSEGKLALQTSGPLTTTDSSTLTITASPPLTTATGSLGIDLKEPIYTQNGKLGLKYGAPLHVTDDLNTLTVATGPGVTINNTSLQTKVTGALGFDSQGNMQLNVAGGLRIDSQNRRLILDVSYPFDAQNQLNLRLGQGPLFINSAHNLDINYNKGLYLFTASNNSKKLEVNLSTAKGLMFDATAIAINAGDGLEFGSPNAPNTNPLKTKIGHGLEFDSNKAMVPKLGTGLSFDSTGAITVGNKNNDKLTLWTTPAPSPNCRLNAEKDAKLTLVLTKCGSQILATVSVLAVKGSLAPISGTVQSAHLIIRFDENGVLLNNSFLDPEYWNFRNGDLTEGTAYTNAVGFMPNLSAYPKSHGKTAKSNIVSQVYLNGDKTKPVTLTITLNGTQETGDTTPSAYSMSFSWDWSGHNYINEIFATSSYTFSYIAQE

SEQ ID NO: 176 - protein, 357 aa, Human adenovirus 5
PGVLSLRLSEPLVTSNGMLALKMGNGLSLDEAGNLTSQNVTTVSPPLKKTKSNINLEISAPLTVTSEALTVAAAAPLMVAGNTLTMQSQAPLTVHDSKLSIATQGPLTVSEGKLALQTSGPLTTTDSSTLTITASPPLTTATGSLGIDLKEPIYTQNGKLGLKYGAPLHVTDDLNTLTVATGPGVTINNTSLQTKVTGALGFDSQGNMQLNVAGGLRIDSQNRRLILDVSYPFDAQNQLNLRLGQGPLFINSAHNLDINYNKGLYLFTASNNSKKLEVNLSTAKGLMFDATAIAINAGDGLEFGSPNAPNTNPLKTKIGHGLEFDSNKAMVPKLGTGLSFDSTGAITVGNKNNDKLT

SEQ ID NO: 177 - protein, 181 aa, Human adenovirus 5
LWTTPAPSPNCRLNAEKDAKLTLVLTKCGSQILATVSVLAVKGSLAPISGTVQSAHLIIRFDENGVLLNNSFLDPEYWNFRNGDLTEGTAYTNAVGFMPNLSAYPKSHGKTAKSNIVSQVYLNGDKTKPVTLTITLNGTQETGDTTPSAYSMSFSWDWSGHNYINEIFATSSYTFSYIAQE

SEQ ID NO: 178 - protein, 571 aa, Human adenovirus 5
MRRAAMYEEGPPPSYESVVSAAPVAAALGSPFDAPLDPPFVPPRYLRPTGGRNSIRYSELAPLFDTTRVYLVDNKSTDVASLNYQNDHSNFLTTVIQNNDYSPGEASTQTINLDDRSHWGGDLKTILHTNMPNVNEFMFTNKFKARVMVSRLPTKDNQVELKYEWVEFTLPEGNYSETMTIDLMNNAIVEHYLKVGRQNGVLESDIGVKFDTRNFRLGFDPVTGLVMPGVYTNEAFHPDIILLPGCGVDFTHSRLSNLLGIRKRQPFQEGFRITYDDLEGGNIPALLDVDAYQASLKDDTEQGGGGAGGSNSSGSGAEENSNAAAAAMQPVEDMNDHAIRGDTFATRAEEKRAEAEAAAEAAAPAAQPEVEKPQKKPVIKPLTEDSKKRSYNLISNDSTFTQYRSWYLAYNYGDPQTGIRSWTLLCTPDVTCGSEQVYWSLPDMMQDPVTFRSTRQISNFPVVGAELLPVHSKSFYNDQAVYSQLIRQFTSLTHVFNRFPENQILARPPAPTITTVSENVPALTDHGTLPLRNSIGGVQRVTITDARRRTCPYVYKALGIVSPRVLSSRTF

SEQ ID NO: 179 - protein, 952 aa, Human adenovirus 5
MATPSMMPQWSYMHISGQDASEYLSPGLVQFARATETYFSLNNKFRNPTVAPTHDVTTDRSQRLTLRFIPVDREDTAYSYKARFTLAVGDNRVLDMASTYFDIRGVLDRGPTFKPYSGTAYNALAPKGAPNPCEWDEAATALEINLEEEDDDNEDEVDEQAEQQKTHVFGQAPYSGINITKEGIQIGVEGQTPKYADKTFQPEPQIGESQWYETEINHAAGRVLKKTTPMKPCYGSYAKPTNENGGQGILVKQQNGKLESQVEMQFFSTTEATAGNGDNLTPKVVLYSEDVDIETPDTHISYMPTIKEGNSRELMGQQSMPNRPNYIAFRDNFIGLMYYNSTGNMGVLAGQASQLNAVVDLQDRNTELSYQLLLDSIGDRTRYFSMWNQAVDSYDPDVRIIENHGTEDELPNYCFPLGGVINTETLTKVKPKTGQENGWEKDATEFSDKNEIRVGNNFAMEINLNANLWRNFLYSNIALYLPDKLKYSPSNVKISDNPNTYDYMNKRVVAPGLVDCYINLGARWSLDYMDNVNPFNHHRNAGLRYRSMLLGNGRYVPFHIQVPQKFFAIKNLLLLPGSYTYEWNFRKDVNMVLQSSLGNDLRVDGASIKFDSICLYATFFPMAHNTASTLEAMLRNDTNDQSFNDYLSAANMLYPIPANATNVPISIPSRNWAAFRGWAFTRLKTKETPSLGSGYDPYYTYSGSIPYLDGTFYLNHTFKKVAITFDSSVSWPGNDRLLTPNEFEIKRSVDGEGYNVAQCNMTKDWFLVQMLANYNIGYQGFYIPESYKDRMYSFFRNFQPMSRQVVDDTKYKDYQQVGILHQHNNSGFVGYLAPTMREGQAYPANFPYPLIGKTAVDSITQKKFLCDRTLWRIPFSSNFMSMGALTDLGQNLLYANSAHALDMTFEVDPMDEPTLLYVLFEVFDVVRVHRPHRGVIETVYLRTPFSAGNATT

SEQ ID NO: 180 - protein, 43 aa, Human adenovirus 5
MKRARPSEDTFNPVYPYDTETGPPTVPFLTPPFVSPNGFQESP

SEQ ID NO: 181 - DNA, 137 bp, Human adenovirus 35
catcatcaataatataccttatagatggaatggtgccaatatgtaaatgaggtgattttaaaaagtgtgggccgtgtggtgattggctgtggggttaacggttaaaaggggcggcgcggccgtgggaaaatgacgtt

SEQ ID NO: 182 - DNA, 137 bp, Human adenovirus 35
aacgtcattttcccacggccgcgccgccccttttaaccgttaaccccacagccaatcaccacacggcccacactttttaaaatcacctcatttacatattggcaccattccatctataaggtatattattgatgatg

SEQ ID NO: 183 - DNA, 342 bp, Human adenovirus 35
ttatgggggtggagtttttttgcaagttgtcgcgggaaatgttacgcataaaaaggcttcttttctcacggaactacttagttttcccacggtatttaacaggaaatgaggtagttttgaccggatgcaagtgaaaattgctgattttcgcgcgaaaactgaatgaggaagtgtttttctgaataatgtggtatttatggcagggtggagtatttgttcagggccaggtagactttgacccattacgtggaggtttcgattaccgtgttttttacctgaatttccgcgtaccgtgtcaaagtcttctgtttttacgtaggtgtcagctgatcgctagggtat

SEQ ID NO: 184 - DNA, 2921 bp, Human adenovirus 35
ttatacctcagggtttgtgtcaagaggccactcttgagtgccagcgagaagagttttctcctctgcgccggcagtttaataataaaaaaatgagagatttgcgatttctgcctcaggaaataatctctgctgagactggaaatgaaatattggagcttgtggtgcacgccctgatgggagacgatccggagccacctgtgcagctttttgagcctcctacgcttcaggaactgtatgatttagaggtagagggatcggaggattctaatgaggaagctgtgaatggcttttttaccgattctatgcttttagctgctaatgaaggattagaattagatccgcctttggacactttcaatactccaggggtgattgtggaaagcggtacaggtgtaagaaaattacctgatttgagttccgtggactgtgatttgcactgctatgaagacgggtttcctccgagtgatgaggaggaccatgaaaaggagcagtccatgcagactgcagcgggtgagggagtgaaggctgccaatgttggttttcagttggattgcccggagcttcctggacatggctgtaagtcttgtgaatttcacaggaaaaatactggagtaaaggaactgttatgttcgctttgttatatgagaacgcactgccactttatttacagtaagtgtgtttaagttaaaatttaaaggaatatgctgtttttcacatgtatattgagtgtgagttttgtgcttcttattataggtcctgtgtctgatgctgatgaatcaccatctcctgattctactacctcacctcctgatattcaagcacctgttcctgtggacgtgcgcaagcccattcctgtgaagcttaagcctgggaaacgtccagcagtggagaaacttgaggacttgttacagggtggggacggacctttggacttgagtacacggaaacgtccaagacaataagtgttccatatccgtgtttacttaaggtgacgtcaatatttgtgtgagagtgcaatgtaataaaaatatgttaactgttcactggtttttattgctttttgggcggggactcaggtatataagtagaagcagacctgtgtggttagctcataggagctggctttcatccatggaggtttgggccattttggaagaccttaggaagactaggcaactgttagagagcgcttcggacggagtctccggtttttggagattctggttcgctagtgaattagctagggtagtttttaggataaaacaggactataaacaagaatttgaaaagttgttggtagattgcccaggactttttgaagctcttaatttgggccatcaggttcactttaaagaaaaagttttatcagttttagacttttcaaccccaggtagaactgctgctgctgtggcttttcttacttttatattagataaatggatcccgcagactcatttcagcaggggatacgttttggatttcatagccacagcattgtggagaacatggaaggttcgcaagatgaggacaatcttaggttactggccagtgcagcctttgggtgtagcgggaatcctgaggcatccaccggtcatgccagcggttctggaggaggaacagcaagaggacaacccgagagccggcctggaccctccagtggaggaggcggagtagctgacttgtctcctgaactgcaacgggtgcttactggatctacgtccactggacgggataggggcgttaagagggagagggcatccagtggtactgatgctagatctgagttggctttaagtttaatgagtcgcagacgtcctgaaaccatttggtggcatgaggttcagaaagagggaagggatgaagtttctgtattgcaggagaaatattcactggaacaggtgaaaacatgttggttggagccagaggatgattgggaggtggccattaaaaattatgccaagatagctttgaggcctgataaacagtataagatcagtagacggattaatatccggaatgcttgttacatatctggaaatggggctgaggtggtaatagatactcaagacaagacagttattagatgctgcatgatggatatgtggcctggagtagtcggtatggaagcagtcacttttgtaaatgttaagtttaggggagatggttataatggaatagtgtttatggccaataccaaacttatattgcatggttgtagcttttttggtttcaacaatacctgtgtagatgcctggggacaggttagtgtacgggggtgtagtttctatgcgtgttggattgccacagctggcagaaccaagagtcaattgtctctgaagaaatgcatattccaaagatgtaacctgggcattctgaatgaaggcgaagcaagggtccgtcactgcgcttctacagatactggatgttttattttaattaagggaaatgccagcgtaaagcataacatgatttgtggtgcttccgatgagaggccttatcaaatgctcacttgtgctggtgggcattgtaatatgctggctactgtgcatattgtttcccatcaacgcaaaaaatggcctgtttttgatcacaatgtgttgaccaagtgcaccatgcatgcaggtgggcgtagaggaatgtttatgccttaccagtgtaacatgaatcatgtgaaagtgttgttggaaccagatgccttttccagaatgagcctaacaggaatctttgacatgaacacgcaaatctggaagatcctgaggtatgatgatacgagatcgagggtgcgcgcatgcgaatgcggaggcaagcatgccaggttccagccggtgtgtgtagatgtgaccgaagatctcagaccggatcatttggttattgcccgcactggagcagagttcggatccagtggagaagaaactgactaa

SEQ ID NO: 185 - DNA, 19450 bp, Human adenovirus 35
ttatttcatttttcgcgcacggtatgccctggaccaccgatctcgatcattgagaactcggtggattttttccagaatcctatagaggtgggattgaatgtttagatacatgggcattaggccgtctttggggtggagatagctccattgaagggattcatgctccggggtagtgttgtaaatcacccagtcataacaaggtcgcagtgcatggtgttgcacaatatcttttagaagtaggctgattgccacagataagcccttggtgtaggtgtttacaaaccggttgagctgggaggggtgcattcgaggtgaaattatgtgcattttggattggatttttaagttggcaatattgccgccaagatcccgtcttgggttcatgttatgaaggactaccaagacggtgtatccggtacatttaggaaatttatcgtgcagcttggatggaaaagcgtggaaaaatttggagacacccttgtgtcctccgagattttccatgcactcatccatgataatagcaatggggccgtgggcagcggcgcgggcaaacacgttccgtgggtctgacacatcatagttatgttcctgagttaaatcatcataagccattttaatgaatttggggcggagcgtaccagattggggtatgaatgttccttcgggccccggagcatagttcccctcacagatttgcatttcccaagctttcagttctgagggtggaatcatgtccacctggggggctatgaagaacaccgtttcgggggcgggggtgattagttgggatgatagcaagtttctgagcaattgagatttgccacatccggtggggccataaataattccgattacaggttgcaggtggtagtttagggaacggcaactgccgtcttctcgaagcaagggggccacctcgttcatcatttcccttacatgcatattttcccgcaccaaatccattaggaggcgctctcctcctagtgatagaagttcttgtagtgaggaaaagtttttcagcggttttagaccgtcagccatgggcattttggaaagagtttgctgcaaaagttctagtctgttccacagttcagtgatgtgttctatggcatctcgatccagcagacctcctcgtttcgcgggtttggacggctcctggagtagggtatgagacgatgggcgtccagcgctgccagggttcggtccttccagggtctcagtgttcgagtcagggttgtttccgtcacagtgaaggggtgtgcgcctgcttgggcgcttgccagggtgcgcttcagactcattctgctggtggagaacttctgtcgcttggcgccctgtatgtcggccaagtagcagtttaccatgagttcgtagttgagcgcctcggctgcgtggcctttggcgcggagcttacctttggaagttttcttgcataccgggcagtataggcatttcagcgcatacagcttgggcgcaaggaaaatggattctggggagtatgcatccgcgccgcaggaggcgcaaacagtttcacattccaccagccaggttaaatccggttcattggggtcaaaaacaagttttccgccatattttttgatgcgtttcttacctttggtctccataagttcgtgtcctcgttgagtgacaaacaggctgtccgtatctccgtagactgattttacaggcctcttctccagtggagtgcctcggtcttcttcgtacaggaactctgaccactctgatacaaaggcgcgcgtccaggccagcacaaaggaggctatgtgggaggggtagcgatcgttgtcaaccagggggtccaccttttccaaagtatgcaaacacatgtcaccctcttcaacatccaggaatgtgattggcttgtaggtgtatttcacgtgacctggggtccccgctgggggggtataaaagggggcggttctttgctcttcctcactgtcttccggatcgctgtccaggaacgtcagctgttggggtaggtattccctctcgaaggcgggcatgacctctgcactcaggttgtcagtttctaagaacgaggaggatttgatattgacagtgccggttgagatgcctttcatgaggttttcgtccatttggtcagaaaacacaatttttttattgtcaagtttggtggcaaatgatccatacagggcgttggataaaagtttggcaatggatcgcatggtttggttcttttccttgtccgcgcgctctttggcggcgatgttgagttggacatactcgcgtgccaggcacttccattcggggaagatagttgttaattcatctggcacgattctcacttgccaccctcgattatgcaaggtaattaaatccacactggtggccacctcgcctcgaaggggttcattggtccaacagagcctacctcctttcctagaacagaaagggggaagtgggtctagcataagttcatcgggagggtctgcatccatggtaaagattcccggaagtaaatccttatcaaaatagctgatgggagtggggtcatctaaggccatttgccattctcgagctgccagtgcgcgctcatatgggttaaggggactgccccagggcatgggatgggtgagagcagaggcatacatgccacagatgtcatagacgtagatgggatcctcaaagatgcctatgtaggttggatagcatcgcccccctctgatacttgctcgcacatagtcatatagttcatgtgatggcgctagcagccccggacccaagttggtgcgattgggtttttctgttctgtagacgatctggcgaaagatggcgtgagaattggaagagatggtgggtctttgaaaaatgttgaaatgggcatgaggtagacctacagagtctctgacaaagtgggcataagattcttgaagcttggttaccagttcggcggtgacaagtacgtctagggcgcagtagtcaagtgtttcttgaatgatgtcataacctggttggtttttcttttcccacagttcgcggttgagaaggtattcttcgcgatccttccagtactcttctagcggaaacccgtctttgtctgcacggtaagatcctagcatgtagaactgattaactgccttgtaagggcagcagcccttctctacgggtagagagtatgcttgagcagcttttcgtagcgaagcgtgagtaagggcaaaggtgtctctgaccatgactttgagaaattggtatttgaagtccatgtcgtcacaggctccctgttcccagagttggaagtctacccgtttcttgtaggcggggttgggcaaagcgaaagtaacatcattgaagagaatcttaccggctctgggcataaaattgcgagtgatgcggaaaggctgtggtacttccgctcgattgttgatcacctgggcagctaggacgatttcgtcgaaaccgttgatgttgtgtcctacgatgtataattctatgaaacgcggcgtgcctctgacgtgaggtagcttactgagctcatcaaaggttaggtctgtggggtcagataaggcgtagtgttcgagagcccattcgtgcaggtgaggatttgcatgtaggaatgatgaccaaagatctaccgccagtgctgtttgtaactggtcccgatactgacgaaaatgccggccaattgccattttttctggagtgacacagtagaaggttctggggtcttgttgccatcgatcccacttgagtttaatggctagatcgtgggccatgttgacgagacgctcttctcctgagagtttcatgaccagcatgaaaggaactagttgtttgccaaaggatcccatccaggtgtaagtttccacatcgtaggtcaggaagagtctttctgtgcgaggatgagagccgatcgggaagaactggatttcctgccaccagttggaggattggctgttgatgtgatggaagtagaagtttctgcggcgcgccgagcattcgtgtttgtgcttgtacagacggccgcagtagtcgcagcgttgcacgggttgtatctcgtgaatgagctgtacctggcttcccttgacgagaaatttcagtgggaagccgaggcctggcgattgtatctcgtgctcttctatattcgctgtatcggcctgttcatcttctgtttcgatggtggtcatgctgacgagcccccgcgggaggcaagtccagacctcggcgcgggaggggcggagctgaaggacgagagcgcgcaggctggagctgtccagagtcctgagacgctgcggactcaggttagtaggtagggacagaagattaacttgcatgatcttttccagggcgtgcgggaggttcagatggtacttgatttccacaggttcgtttgtagagacgtcaatggcttgcagggttccgtgtcctttgggcgccactaccgtacctttgttttttcttttgatcggtggtggctctcttgcttcttgcatgctcagaagcggtgacggggacgcgcgccgggcggcagcggttgttccggacccgggggcatggctggtagtggcacgtcggcgccgcgcacgggcaggttctggtattgcgctctgagaagacttgcgtgcgccaccacgcgtcgattgacgtcttgtatctgacgtctctgggtgaaagctaccggccccgtgagcttgaacctgaaagagagttcaacagaatcaatttcggtatcgttaacggcagcttgtctcagtatttcttgtacgtcaccagagttgtcctggtaggcgatctccgccatgaactgctcgatttcttcctcctgaagatctccgcgacccgctctttcgacggtggccgcgaggtcattggagatacggcccatgagttgggagaatgcattcatgcccgcctcgttccagacgcggctgtaaaccacggccccctcggagtctcttgcgcgcatcaccacctgagcgaggttaagctccacgtgtctggttaagaccgcatagttgcataggcgctgaaaaaggtagttgagtgtggtggcaatgtgttcggcgacgaagaaatacatgatccatcgtctcagcggcatttcgctaacatcgcccagagcttccaagcgctccatggcctcgtagaagtccacggcaaaattaaaaaactgggagtttcgcgcggacacggtcaattcctcctcgagaagacggatgagttcggctatggtggcccgtacttcgcgttcgaaggctcccgggatctcttcttcctcttctatctcttcttccactaacatctcttcttcgtcttcaggcgggggcggagggggcacgcggcgacgtcgacggcgcacgggcaaacggtcgatgaatcgttcaatgacctctccgcggcggcggcgcatggtttcagtgacggcgcggccgttctcgcgcggtcgcagagtaaaaacaccgccgcgcatctccttaaagtggtgactgggaggttctccgtttgggagggagagggcgctgattatacattttattaattggcccgtagggactgcgcgcagagatctgatcgtgtcaagatccacgggatctgaaaacctttcgacgaaagcgtctaaccagtcacagtcacaaggtaggctgagtacggcttcttgtgggcgggggtggttatgtgttcggtctgggtcttctgtttcttcttcatctcgggaaggtgagacgatgctgctggtgatgaaattaaagtaggcagttctaagacggcggatggtggcgaggagcaccaggtctttgggtccggcttgctggatacgcaggcgattggccattccccaagcattatcctgacatctagcaagatctttgtagtagtcttgcatgagccgttctacgggcacttcttcctcacccgttctgccatgcatacgtgtgagtccaaatccgcgcattggttgtaccagtgccaagtcagctacgactctttcggcgaggatggcttgctgtacttgggtaagggtggcttgaaagtcatcaaaatccacaaagcggtggtaagcccctgtattaatggtgtaagcacagttggccatgactgaccagttaactgtctggtgaccagggcgcacgagctcggtgtatttaaggcgcgaataggcgcgggtgtcaaagatgtaatcgttgcaggtgcgcaccagatactggtaccctataagaaaatgcggcggtggttggcggtagagaggccatcgttctgtagctggagcgccaggggcgaggtcttccaacataaggcggtgatagccgtagatgtacctggacatccaggtgattcctgcggcggtagtagaagcccgaggaaactcgcgtacgcggttccaaatgttgcgtagcggcatgaagtagttcattgtaggcacggtttgaccagtgaggcgcgcgcagtcattgatgctctatagacacggagaaaatgaaagcgttcagcgactcgactccgtagcctggaggaacgtgaacgggttgggtcgcggtgtaccccggttcgagacttgtactcgagccggccggagccgcggctaacgtggtattggcactcccgtctcgacccagcctacaaaaatccaggatacggaatcgagtcgttttgctggtttccgaatggcagggaagtgagtcctatttttttttttttttgccgctcagaatgcatcccgtgctgcgacagatgcgcccccaacaacagcccccctcgcagcagcagcagcagcaaccacaaaaggctgtccctgcaactactgcaactgccgccgtgagcggtgcgggacagcccgcctatgatctggacttggaagagggcgaaggactggcacgtctaggtgcgccttcgcccgagcggcatccgcgagttcaactgaaaaaagattctcgcgaggcgtatgtgccccaacagaacctatttagagacagaagcggcgaggagccggaggagatgcgagcttcccgctttaacgcgggtcgtgagctgcgtcacggtttggaccgaagacgagtgttgcgagacgaggatttcgaagttgatgaagtgacagggatcagtcctgccagggcacacgtggctgcagccaaccttgtatcggcttacgagcagacagtaaaggaagagcgtaacttccaaaagtcttttaataatcatgtgcgaaccctgattgcccgcgaagaagttacccttggtttgatgcatttgtgggatttgatggaagctatcattcagaaccctactagcaaacctctgaccgcccagctgtttctggtggtgcaacacagcagagacaatgaggctttcagagaggcgctgctgaacatcaccgaacccgaggggagatggttgtatgatcttatcaacattctacagagtatcatagtgcaggagcggagcctgggcctggccgagaaggtagctgccatcaattactcggttttgagcttgggaaaatattacgctcgcaaaatctacaagactccatacgttcccatagacaaggaggtgaagatagatgggttctacatgcgcatgacgctcaaggtcttgaccctgagcgatgatcttggggtgtatcgcaatgacagaatgcatcgcgcggttagcgccagcaggaggcgcgagttaagcgacagggaactgatgcacagtttgcaaagagctctgactggagctggaaccgagggtgagaattacttcgacatgggagctgacttgcagtggcagcctaatcgcagggctctgagcgccgcgacggcaggatgtgagcttccttacatagaagaggcggatgaaggcgaggaggaagagggcgagtacttggaagactgatggcacaacccgtgttttttgctagatggaacagcaagcaccggatcccgcaatgcgggcggcgctgcagagccagccgtccggcattaactcctcggacgattggacccaggccatgcaacgtatcatggcgttgacgactcgcaaccccgaagcctttagacagcaaccccaggccaaccgtctatcggccatcatggaagctgtagtgccttcccgatctaatcccactcatgagaaggtcctggccatcgtgaacgcgttggtggagaacaaagctattcgtccagatgaggccggactggtatacaacgctctcttagaacgcgtggctcgctacaacagtagcaatgtgcaaaccaatttggaccgtatgataacagatgtacgcgaagccgtgtctcagcgcgaaaggttccagcgtgatgccaacctgggttcgctggtggcgttaaatgctttcttgagtactcagcctgctaatgtgccgcgtggtcaacaggattatactaactttttaagtgctttgagactgatggtatcagaagtacctcagagcgaagtgtatcagtccggtcctgattacttctttcagactagcagacagggcttgcagacggtaaatctgagccaagcttttaaaaaccttaaaggtttgtggggagtgcatgccccggtaggagaaagagcaaccgtgtctagcttgttaactccgaactcccgcctgttattactgttggtagctcctttcaccgacagcggtagcatcgaccgtaattcctatttgggttacctactaaacctgtatcgcgaagccatagggcaaagtcaggtggacgagcagacctatcaagaaattacccaagtcagtcgcgctttgggacaggaagacactggcagtttggaagccactctgaacttcttgcttaccaatcggtctcaaaagatccctcctcaatatgctcttactgcggaggaggagaggatccttagatatgtgcagcagagcgtgggattgtttctgatgcaagagggggcaactccgactgcagcactggacatgacagcgcgaaatatggagcccagcatgtatgccagtaaccgacctttcattaacaaactgctggactacttgcacagagctgccgctatgaactctgattatttcaccaatgccatcttaaacccgcactggctgcccccacctggtttctacacgggcgaatatgacatgcccgaccctaatgacggatttctgtgggacgacgtggacagcgatgttttttcacctctttctgatcatcgcacgtggaaaaaggaaggcggtgatagaatgcattcttctgcatcgctgtccggggtcatgggtgctaccgcggctgagcccgagtctgcaagtccttttcctagtctacccttttctctacacagtgtacgtagcagcgaagtgggtagaataagtcgcccgagtttaatgggcgaagaggagtacctaaacgattccttgctcagaccggcaagagaaaaaaatttcccaaacaatggaatagaaagtttggtggataaaatgagtagatggaagacttatgctcaggatcacagagacgagcctgggatcatggggactacaagtagagcgagccgtagacgccagcgccatgacagacagaggggtcttgtgtgggacgatgaggattcggccgatgatagcagcgtgttggacttgggtgggagaggaaggggcaacccgtttgctcatttgcgccctcgcttgggtggtatgttgtgaaaaaaaataaaaaagaaaaactcaccaaggccatggcgacgagcgtacgttcgttcttctttattatctgtgtctagtataatgaggcgagtcgtgctaggcggagcggtggtgtatccggagggtcctcctccttcgtacgagagcgtgatgcagcagcagcaggcgacggcggtgatgcaatccccactggaggctccctttgtgcctccgcgatacctggcacctacggagggcagaaacagcattcgttactcggaactggcacctcagtacgataccaccaggttgtatctggtggacaacaagtcggcggacattgcttctctgaactatcagaatgaccacagcaacttcttgaccacggtggtgcagaacaatgactttacccctacggaagccagcacccagaccattaactttgatgaacgatcgcggtggggcggtcagctaaagaccatcatgcatactaacatgccaaacgtgaacgagtatatgtttagtaacaagttcaaagcgcgtgtgatggtgtccagaaaacctcccgacggtgctgcagttggggatacttatgatcacaagcaggatattttggaatatgagtggttcgagtttactttgccagaaggcaacttttcagttactatgactattgatttgatgaacaatgccatcatagataattacttgaaagtgggtagacagaatggagtgcttgaaagtgacattggtgttaagttcgacaccaggaacttcaagctgggatgggatcccgaaaccaagttgatcatgcctggagtgtatacgtatgaagccttccatcctgacattgtcttactgcctggctgcggagtggattttaccgagagtcgtttgagcaaccttcttggtatcagaaaaaaacagccatttcaagagggttttaagattttgtatgaagatttagaaggtggtaatattccggccctcttggatgtagatgcctatgagaacagtaagaaagaacaaaaagccaaaatagaagctgctacagctgctgcagaagctaaggcaaacatagttgccagcgactctacaagggttgctaacgctggagaggtcagaggagacaattttgcgccaacacctgttccgactgcagaatcattattggccgatgtgtctgaaggaacggacgtgaaactcactattcaacctgtagaaaaagatagtaagaatagaagctataatgtgttggaagacaaaatcaacacagcctatcgcagttggtatctttcgtacaattatggcgatcccgaaaaaggagtgcgttcctggacattgctcaccacctcagatgtcacctgcggagcagagcaggtttactggtcgcttccagacatgatgaaggatcctgtcactttccgctccactagacaagtcagtaactaccctgtggtgggtgcagagcttatgcccgtcttctcaaagagcttctacaacgaacaagctgtgtactcccagcagctccgccagtccacctcgcttacgcacgtcttcaaccgctttcctgagaaccagattttaatccgtccgccggcgcccaccattaccaccgtcagtgaaaacgttcctgctctcacagatcacgggaccctgccgttgcgcagcagtatccggggagtccaacgtgtgaccgttactgacgccagacgccgcacctgtccctacgtgtacaaggcactgggcatagtcgcaccgcgcgtcctttcaagccgcactttctaaaaaaaaaatgtccattcttatctcgcccagtaataacaccggttggggtctgcgcgctccaagcaagatgtacggaggcgcacgcaaacgttctacccaacatcccgtgcgtgttcgcggacattttcgcgctccatggggtgccctcaagggccgcactcgcgttcgaaccaccgtcgatgatgtaatcgatcaggtggttgccgacgcccgtaattatactcctactgcgcctacatctactgtggatgcagttattgacagtgtagtggctgacgctcgcaactatgctcgacgtaagagccggcgaaggcgcattgccagacgccaccgagctaccactgccatgcgagccgcaagagctctgctacgaagagctagacgcgtggggcgaagagccatgcttagggcggccagacgtgcagcttcgggcgccagcgccggcaggtcccgcaggcaagcagccgctgtcgcagcggcgactattgccgacatggcccaatcgcgaagaggcaatgtatactgggtgcgtgacgctgccaccggtcaacgtgtacccgtgcgcacccgtccccctcgcacttagaagatactgagcagtctccgatgttgtgtcccagcggcgaggatgtccaagcgcaaatacaaggaagaaatgctgcaggttatcgcacctgaagtctacggccaaccgttgaaggatgaaaaaaaaccccgcaaaatcaagcgggttaaaaaggacaaaaaagaagaggaagatggcgatgatgggctggcggagtttgtgcgcgagtttgccccacggcgacgcgtgcaatggcgtgggcgcaaagttcgacatgtgttgagacctggaacttcggtggtctttacacccggcgagcgttcaagcgctacttttaagcgttcctatgatgaggtgtacggggatgatgatattcttgagcaggcggctgaccgattaggcgagtttgcttatggcaagcgtagtagaataacttccaaggatgagacagtgtcaatacccttggatcatggaaatcccacccctagtcttaaaccggtcactttgcagcaagtgttacccgtaactccgcgaacaggtgttaaacgcgaaggtgaagatttgtatcccactatgcaactgatggtacccaaacgccagaagttggaggacgttttggagaaagtaaaagtggatccagatattcaacctgaggttaaagtgagacccattaagcaggtagcgcctggtctgggggtacaaactgtagacattaagattcccactgaaagtatggaagtgcaaactgaacccgcaaagcctactgccacctccactgaagtgcaaacggatccatggatgcccatgcctattacaactgacgccgccggtcccactcgaagatcccgacgaaagtacggtccagcaagtctgttgatgcccaattatgttgtacacccatctattattcctactcctggttaccgaggcactcgctactatcgcagccgaaacagtacctcccgccgtcgccgcaagacacctgcaaatcgcagtcgtcgccgtagacgcacaagcaaaccgactcccggcgccctggtgcggcaagtgtaccgcaatggtagtgcggaacctttgacactgccgcgtgcgcgttaccatccgagtatcatcacttaatcaatgttgccgctgcctccttgcagatatggccctcacttgtcgccttcgcgttcccatcactggttaccgaggaagaaactcgcgccgtagaagagggatgttgggacgcggaatgcgacgctacaggcgacggcgtgctatccgcaagcaattgcggggtggttttttaccagccttaattccaattatcgctgctgcaattggcgcgataccaggcatagcttccgtggcggttcaggcctcgcaacgacattgacattggaaaaaaaacgtataaataaaaaaaaatacaatggactctgacactcctggtcctgtgactatgttttcttagagatggaagacatcaatttttcatccttggctccgcgacacggcacgaagccgtacatgggcacctggagcgacatcggcacgagccaactgaacgggggcgccttcaattggagcagtatctggagcgggcttaaaaattttggctcaaccataaaaacatacgggaacaaagcttggaacagcagtacaggacaggcgcttagaaataaacttaaagaccagaacttccaacaaaaagtagtcgatgggatagcttccggcatcaatggagtggtagatttggctaaccaggctgtgcagaaaaagataaacagtcgtttggacccgccgccagcaaccccaggtgaaatgcaagtggaggaagaaattcctccgccagaaaaacgaggcgacaagcgtccgcgtcccgatttggaagagacgctggtgacgcgcgtagatgaaccgccttcttatgaggaagcaacgaagcttggaatgcccaccactagaccgatagccccaatggccaccggggtgatgaaaccttctcagttgcatcgacccgtcaccttggatttgccccctccccctgctgctactgctgtacccgcttctaagcctgtcgctgccccgaaaccagtcgccgtagccaggtcacgtcccgggggcgctcctcgtccaaatgcgcactggcaaaatactctgaacagcatcgtgggtctaggcgtgcaaagtgtaaaacgccgtcgctgcttttaattaaatatggagtagcgcttaacttgcctatctgtgtatatgtgtcattacacgccgtcacagcagcagaggaaaaaaggaagaggtcgtgcgtcgacgctgagttactttcaagatggccaccccatcgatgctgccccaatgggcatacatgcacatcgccggacaggatgcttcggagtacctgagtccgggtctggtgcagttcgcccgcgccacagacacctacttcaatctgggaaataagtttagaaatcccaccgtagcgccgacccacgatgtgaccaccgaccgtagccagcggctcatgttgcgcttcgtgcccgttgaccgggaggacaatacatactcttacaaagtgcggtacaccctggccgtgggcgacaacagagtgctggatatggccagcacgttctttgacattaggggcgtgttggacagaggtcccagtttcaaaccctattctggtacggcttacaactctctggctcctaaaggcgctccaaatgcatctcaatggattgcaaaaggcgtaccaactgcagcagccgcaggcaatggtgaagaagaacatgaaacagaggagaaaactgctacttacacttttgccaatgctcctgtaaaagccgaggctcaaattacaaaagagggcttaccaataggtttggagatttcagctgaaaacgaatctaaacccatctatgcagataaactttatcagccagaacctcaagtgggagatgaaacttggactgacctagacggaaaaaccgaagagtatggaggcagggctctaaagcctactactaacatgaaaccctgttacgggtcctatgcgaagcctactaatttaaaaggtggtcaggcaaaaccgaaaaactcggaaccgtcgagtgaaaaaattgaatatgatattgacatggaattttttgataactcatcgcaaagaacaaacttcagtcctaaaattgtcatgtatgcagaaaatgtaggtttggaaacgccagacactcatgtagtgtacaaacctggaacagaagacacaagttccgaagctaatttgggacaacagtctatgcccaacagacccaactacattggcttcagagataactttattggactcatgtactataacagtactggtaacatgggggtgctggctggtcaagcgtctcagttaaatgcagtggttgacttgcaggacagaaacacagaactttcttaccaactcttgcttgactctctgggcgacagaaccagatactttagcatgtggaatcaggctgtggacagttatgatcctgatgtacgtgttattgaaaatcatggtgtggaagatgaacttcccaactattgttttccactggacggcataggtgttccaacaaccagttacaaatcaatagttccaaatggagaagataataataattggaaagaacctgaagtaaatggaacaagtgagatcggacagggtaatttgtttgccatggaaattaaccttcaagccaatctatggcgaagtttcctttattccaatgtggctctgtatctcccagactcgtacaaatacaccccgtccaatgtcactcttccagaaaacaaaaacacctacgactacatgaacgggcgggtggtgccgccatctctagtagacacctatgtgaacattggtgccaggtggtctctggatgccatggacaatgtcaacccattcaaccaccaccgtaacgctggcttgcgttaccgatctatgcttctgggtaacggacgttatgtgcctttccacatacaagtgcctcaaaaattcttcgctgttaaaaacctgctgcttctcccaggctcctacacttatgagtggaactttaggaaggatgtgaacatggttctacagagttccctcggtaacgacctgcgggtagatggcgccagcatcagtttcacgagcatcaacctctatgctacttttttccccatggctcacaacaccgcttccacccttgaagccatgctgcggaatgacaccaatgatcagtcattcaacgactacctatctgcagctaacatgctctaccccattcctgccaatgcaaccaatattcccatttccattccttctcgcaactgggcggctttcagaggctggtcatttaccagactgaaaaccaaagaaactccctctttggggtctggatttgacccctactttgtctattctggttctattccctacctggatggtaccttctacctgaaccacacttttaagaaggtttccatcatgtttgactcttcagtgagctggcctggaaatgacaggttactatctcctaacgaatttgaaataaagcgcactgtggatggcgaaggctacaacgtagcccaatgcaacatgaccaaagactggttcttggtacagatgctcgccaactacaacatcggctatcagggcttctacattccagaaggatacaaagatcgcatgtattcatttttcagaaacttccagcccatgagcaggcaggtggttgatgaggtcaattacaaagacttcaaggccgtcgccataccctaccaacacaacaactctggctttgtgggttacatggctccgaccatgcgccaaggtcaaccctatcccgctaactatccctatccactcattggaacaactgccgtaaatagtgttacgcagaaaaagttcttgtgtgacagaaccatgtggcgcataccgttctcgagcaacttcatgtctatgggggcccttacagacttgggacagaatatgctctatgccaactcagctcatgctctggacatgacctttgaggtggatcccatggatgagcccaccctgctttatcttctcttcgaagttttcgacgtggtcagagtgcatcagccacaccgcggcatcatcgaggcagtctacctgcgtacaccgttctcggccggtaacgctaccacgtaagaagcttcttgcttcttgcaaatagcagctgcaaccatggcctgcggatcccaaaacggctccagcgagcaagagctcagagccattgtccaagacctgggttgcggaccctattttttgggaacctacgataagcgcttcccggggttcatggcccccgataagctcgcctgtgccattgtaaatacggccggacgtgagacggggggagagcactggttggctttcggttggaacccacgttctaacacctgctacctttttgatccttttggattctcggatgatcgtctcaaacagatttaccagtttgaatatgagggtctcctgcgccgcagcgctcttgctaccaaggaccgctgtattacgctggaaaaatctacccagaccgtgcagggcccccgttctgccgcctgcggacttttctgctgcatgttccttcacgcctttgtgcactggcctgaccgtcccatggacggaaaccccaccatgaaattgctaactggagtgccaaacaacatgcttcattctcctaaagtccagcccaccctgtgtgacaatcaaaaagcactctaccattttcttaatacccattcgccttattttcgctctcatcgtacacacatcgaaagggccactgcgttcgaccgtatggatgttcaataatgactcatgtaaacaacgtgttcaataaacatcactttatttttttacatgtatcaaggctctggattacttatttatttacaagtcgaatgggttctgacgagaatcagaatgacccgcaggcagtgatacgttgcggaactgatacttgggttgccacttgaattcgggaatcaccaacttgggaaccggtatatcgggcaggatgtcactccacagctttctggtcagctgcaaagctccaagcaggtcaggagccgaaatcttgaaatcacaattaggaccagtgctctgagcgcgagagttgcggtacaccggattgcagcactgaaacaccatcagcgacggatgtctcacgcttgccagcacggtgggatctgcaatcatgcccacatccagatcttcagcattggcaatgctgaacggggtcatcttgcaggtctgcctacccatggcgggcacccaattaggcttgtggttgcaatcgcagtgcagggggatcagtatcatcttggcctgatcctgtctgattcctggatacacggctctcatgaaagcatcatattgcttgaaagcctgctgggctttactaccctcgggataaaacatcccgcaggacctgctcgaaaactggttagcctgcacagccggcatcattcacacagcagcgggcgtcattgttggctatttgcaccacacttctgccccagcggttttgggtgattttggttcgctcgggattctcctttaaggctcgttgtccgttctcgctggccacatccatctcgataatctgctccttctgaatcataatattgccatgcaggcacttcagcttgccctcataatcattgcagccatgaggccacaacgcacagcctgtacattcccaattatggtgggcgatctgagaaaaagaatgtatcattccctgcagaaatcttcccatcatcgtgctcagtgtcttgtgactagtgaaagttaactggatgcctcggtgctcttcgtttacgtactggtgacagatgcgcttgtattgttcgtgttgctcaggcattagtttaaaacaggttctaagttcgttatccagcctgtacttctccatcagcagacacatcacttccatgcctttctcccaagcagacaccaggggcaagctaatcggattcttaacagtgcaggcagcagctcctttagccagagggtcatctttagcgatcttctcaatgcttcttttgccatccttctcaacgatgcgcacgggcgggtagctgaaacccactgctacaagttgcgcctcttctctttcttcttcgctgtcttgactgatgtcttgcatggggatatgtttggtcttccttggcttctttttggggggtatcggaggaggaggactgtcgctccgttccggagacagggaggattgtgacgtttcgctcaccattaccaactgactgtcggtagaagaacctgaccccacacggcgacaggtgtttttcttcgggggcagaggtggaggcgattgcgaagggctgcggtccgacctggaaggcggatgactggcagaaccccttccgcgttcgggggtgtgctccctgtggcggtcgcttaactgatttccttcgcggctggccat

SEQ ID NO: 186 - DNA, 3425 bp, Human adenovirus 35
atgtctggtgacgcggctgagctatctcggctgcgacatctagaccactgccgccgctttcgctgctttgcccgggaacttattgagttcatctacttcgaactccccaaggatcaccctcaaggtccggcccacggagtgcggattactatcgaaggcaaaatagactctcgcctgcaacgaattttctcccagcggcccgtgctgatcgagcgagaccagggaaacaccacggtttccatctactgcatttgtaatcaccccggattgcatgaaagcctttgctgtcttatgtgtactgagtttaataaaaactgaattaagactctcctacggactgccgcttcttcaacccggattttacaaccagaagaacaaaacttttcctgtcgtccaggactctgttaacttcacctttcctactcacaaactagaagctcaacgactacaccgcttttccagaagcattttccctactaatactactttcaaaaccggaggtgagctccacggtctccctacagaaaacccttgggtggaagcgggccttgtagtactaggaattcttgcgggtgggcttgtgattattctttgctacctatacacaccttgcttcactttcctagtggtgttgtggtattggtttaaaaaatggggcccatactagtcttgcttgttttactttcgcttttggaaccgggttctgccaattacgatccatgtctagactttgacccagaaaactgcacacttacttttgcacccgacacaagccgcatctgtggagttcttattaagtgcggatgggaatgcaggtccgttgaaattacacacaataacaaaacctggaacaataccttatccaccacatgggagccaggagttcccgagtggtacactgtctctgtccgaggtcctgacggttccatccgcattagtaacaacactttcattttttctgaaatgtgcgatctggccatgttcatgagcaaacagtattctctatggcctcctagcaaggacaacatcgtaacgttctccattgcttattgcttgtgcgcttgccttcttactgctttactgtgcgtatgcatacacctgcttgtaaccactcgcatcaaaaacgccaataacaaagaaaaaatgccttaacctctttctgtttacagacatggcttctcttacatctctcatatttgtcagcattgtcactgccgctcacggacaaacagtcgtctctatcccactaggacataattacactctcataggacccccaatcacttcagaggtcatctggaccaaactgggaagcgttgattactttgatataatctgtaacaaaacaaaaccaataatagtaacttgcaacatacaaaatcttacattgattaatgttagcaaagtttacagcggttactattatggttatgacagatacagtagtcaatatagaaattacttggttcgtgttacccagttgaaaaccacgaaaatgccaaatatggcaaagattcgatccgatgacaattctctagaaacttttacatctcccaccacacccgacgaaaaaaacatcccagattcaatgattgcaattgttgcagcggtggcagtggtgatggcactaataataatatgcatgcttttatatgcttgtcgctacaaaaagtttcatcctaaaaaacaagatctcctactaaggcttaacatttaatttctttttatacagccatggtttccactaccacattccttatgcttactagtctcgcaactctgacttctgctcgctcacacctcactgtaactataggctcaaactgcacactaaaaggacctcaaggtggtcatgtcttttggtggagaatatatgacaatggatggtttacaaaaccatgtgaccaacctggtagatttttctgcaacggcagagacctaaccattatcaacgtgacagcaaatgacaaaggcttctattatggaaccgactataaaagtagtttagattataacattattgtactgccatctaccactccaccaccccgcacaactactttctctagcagcagtgtcgctaacaatacaatttccaatccaacctttgccgcgcttttaaaacgcactgtgaataattctacaacttcacatacaacaatttccacttcaacaatcagcatcatcgctgcagtgacaattggaatatctattcttgtttttaccataacctactacgcctgctgctatagaaaagacaaacataaaggtgatccattacttagatttgatatttaatttgttctttttttttatttacagtatggtgaacaccaatcatggtacctagaaatttcttcttcaccatactcatctgtgcttttaatgtttgcgctactttcacagcagtagccacagcaaccccagactgtataggagcatttgcttcctatgcactttttgcttttgttacttgcatctgcgtatgtagcatagtctgcctggttattaattttttccaacttctagactggatccttgtgcgaattgcctacctgcgccaccatcccgaataccgcaaccaaaatatcgcggcacttcttagactcatctaaaaccatgcaggctatactaccaatatttttgcttctattgcttccctacgctgtctcaaccccagctgcctatagtactccaccagaacaccttagaaaatgcaaattccaacaaccgtggtcatttcttgcttgctatcgagaaaaatcagaaatccccccaaatttaataatgattgctggaataattaatataatctgttgcaccataatttcatttttgatataccccctatttgattttggctggaatgctcccaatgcacatgatcatccacaagacccagaggaacacattcccccacaaaacatgcaacatccaatagcgctaatagattacgaaagtgaaccacaacccccactactccctgctattagttacttcaacctaaccggcggagatgactgaaacactcaccacctccaattccgccgaggatctgctcgatatggacggccgcgtctcagaacaacgacttgcccaactacgcatccgccagcagcaggaacgcgtggccaaagagctcagagatgtcatccaaattcaccaatgcaaaaaaggcatattctgtttggtaaaacaagccaagatatcctacgagatcaccgctactgaccatcgcctctcttacgaacttggcccccaacgacaaaaatttacctgcatggtgggaatcaaccccatagttatcacccaacaaagtggagatactaagggttgcattcactgttcctgcgattccatcgagtgcacctacaccctgctgaagaccctatgcggcctaagagacctgctaccaatgaattaaa

SEQ ID NO: 187 - DNA, 972 bp, Human adenovirus 35
atgaccaagagagtccggctcagtgactccttcaaccctgtctacccctatgaagatgaaagcacctcccaacaccccttttataacccagggtttatttccccaaatggcttcacacaaagcccagacggagttcttactttaaaatgtttaaccccactaacaaccacaggcggatctctacagctaaaagtgggagggggacttacagtggatgacactgatggtaccttacaagaaaacatacgtgctacagcacccattactaaaaataatcactctgtagaactatccattggaaatggattagaaactcaaaacaataaactatgtgccaaattgggaaatgggttaaaatttaacaacggtgacatttgtataaaggatagtattaacaccttatggactggaataaaccctccacctaactgtcaaattgtggaaaacactaatacaaatgatggcaaacttactttagtattagtaaaaaatggagggcttgttaatggctacgtgtctctagttggtgtatcagacactgtgaaccaaatgttcacacaaaagacagcaaacatccaattaagattatattttgactcttctggaaatctattaactgaggaatcagacttaaaaattccacttaaaaataaatcttctacagcgaccagtgaaactgtagccagcagcaaagcctttatgccaagtactacagcttatcccttcaacaccactactagggatagtgaaaactacattcatggaatatgttactacatgactagttatgatagaagtctatttcccttgaacatttctataatgctaaacagccgtatgatttcttccaatgttgcctatgccatacaatttgaatggaatctaaatgcaagtgaatctccagaaagcaacatagctacgctgaccacatccccctttttcttttcttacattacagaagacgacaactaa

SEQ ID NO: 188 - DNA, 126 bp, Human adenovirus 35
atgaccaagagagtccggctcagtgactccttcaaccctgtctacccctatgaagatgaaagcacctcccaacaccccttttataacccagggtttatttccccaaatggcttcacacaaagccca

SEQ ID NO: 189 - DNA, 273 bp, Human adenovirus 35; identical to SEQ ID NO: 117

SEQ ID NO: 190 - DNA, 573 bp, Human adenovirus 35
ttatggactggaataaaccctccacctaactgtcaaattgtggaaaacactaatacaaatgatggcaaacttactttagtattagtaaaaaatggagggcttgttaatggctacgtgtctctagttggtgtatcagacactgtgaaccaaatgttcacacaaaagacagcaaacatccaattaagattatattttgactcttctggaaatctattaactgaggaatcagacttaaaaattccacttaaaaataaatcttctacagcgaccagtgaaactgtagccagcagcaaagcctttatgccaagtactacagcttatcccttcaacaccactactagggatagtgaaaactacattcatggaatatgttactacatgactagttatgatagaagtctatttcccttgaacatttctataatgctaaacagccgtatgatttcttccaatgttgcctatgccatacaatttgaatggaatctaaatgcaagtgaatctccagaaagcaacatagctacgctgaccacatccccctttttcttttcttacattacagaagacgacaactaa

SEQ ID NO: 191 - DNA, 1686 bp, Human adenovirus 35
atgaggcgagtcgtgctaggcggagcggtggtgtatccggagggtcctcctccttcgtacgagagcgtgatgcagcagcagcaggcgacggcggtgatgcaatccccactggaggctccctttgtgcctccgcgatacctggcacctacggagggcagaaacagcattcgttactcggaactggcacctcagtacgataccaccaggttgtatctggtggacaacaagtcggcggacattgcttctctgaactatcagaatgaccacagcaacttcttgaccacggtggtgcagaacaatgactttacccctacggaagccagcacccagaccattaactttgatgaacgatcgcggtggggcggtcagctaaagaccatcatgcatactaacatgccaaacgtgaacgagtatatgtttagtaacaagttcaaagcgcgtgtgatggtgtccagaaaacctcccgacggtgctgcagttggggatacttatgatcacaagcaggatattttggaatatgagtggttcgagtttactttgccagaaggcaacttttcagttactatgactattgatttgatgaacaatgccatcatagataattacttgaaagtgggtagacagaatggagtgcttgaaagtgacattggtgttaagttcgacaccaggaacttcaagctgggatgggatcccgaaaccaagttgatcatgcctggagtgtatacgtatgaagccttccatcctgacattgtcttactgcctggctgcggagtggattttaccgagagtcgtttgagcaaccttcttggtatcagaaaaaaacagccatttcaagagggttttaagattttgtatgaagatttagaaggtggtaatattccggccctcttggatgtagatgcctatgagaacagtaagaaagaacaaaaagccaaaatagaagctgctacagctgctgcagaagctaaggcaaacatagttgccagcgactctacaagggttgctaacgctggagaggtcagaggagacaattttgcgccaacacctgttccgactgcagaatcattattggccgatgtgtctgaaggaacggacgtgaaactcactattcaacctgtagaaaaagatagtaagaatagaagctataatgtgttggaagacaaaatcaacacagcctatcgcagttggtatctttcgtacaattatggcgatcccgaaaaaggagtgcgttcctggacattgctcaccacctcagatgtcacctgcggagcagagcaggtttactggtcgcttccagacatgatgaaggatcctgtcactttccgctccactagacaagtcagtaactaccctgtggtgggtgcagagcttatgcccgtcttctcaaagagcttctacaacgaacaagctgtgtactcccagcagctccgccagtccacctcgcttacgcacgtcttcaaccgctttcctgagaaccagattttaatccgtccgccggcgcccaccattaccaccgtcagtgaaaacgttcctgctctcacagatcacgggaccctgccgttgcgcagcagtatccggggagtccaacgtgtgaccgttactgacgccagacgccgcacctgtccctacgtgtacaaggcactgggcatagtcgcaccgcgcgtcctttcaagccgcactttctaa

SEQ ID NO: 192 - DNA, 2859 bp, Human adenovirus 35
atggccaccccatcgatgctgccccaatgggcatacatgcacatcgccggacaggatgcttcggagtacctgagtccgggtctggtgcagttcgcccgcgccacagacacctacttcaatctgggaaataagtttagaaatcccaccgtagcgccgacccacgatgtgaccaccgaccgtagccagcggctcatgttgcgcttcgtgcccgttgaccgggaggacaatacatactcttacaaagtgcggtacaccctggccgtgggcgacaacagagtgctggatatggccagcacgttctttgacattaggggcgtgttggacagaggtcccagtttcaaaccctattctggtacggcttacaactctctggctcctaaaggcgctccaaatgcatctcaatggattgcaaaaggcgtaccaactgcagcagccgcaggcaatggtgaagaagaacatgaaacagaggagaaaactgctacttacacttttgccaatgctcctgtaaaagccgaggctcaaattacaaaagagggcttaccaataggtttggagatttcagctgaaaacgaatctaaacccatctatgcagataaactttatcagccagaacctcaagtgggagatgaaacttggactgacctagacggaaaaaccgaagagtatggaggcagggctctaaagcctactactaacatgaaaccctgttacgggtcctatgcgaagcctactaatttaaaaggtggtcaggcaaaaccgaaaaactcggaaccgtcgagtgaaaaaattgaatatgatattgacatggaattttttgataactcatcgcaaagaacaaacttcagtcctaaaattgtcatgtatgcagaaaatgtaggtttggaaacgccagacactcatgtagtgtacaaacctggaacagaagacacaagttccgaagctaatttgggacaacagtctatgcccaacagacccaactacattggcttcagagataactttattggactcatgtactataacagtactggtaacatgggggtgctggctggtcaagcgtctcagttaaatgcagtggttgacttgcaggacagaaacacagaactttcttaccaactcttgcttgactctctgggcgacagaaccagatactttagcatgtggaatcaggctgtggacagttatgatcctgatgtacgtgttattgaaaatcatggtgtggaagatgaacttcccaactattgttttccactggacggcataggtgttccaacaaccagttacaaatcaatagttccaaatggagaagataataataattggaaagaacctgaagtaaatggaacaagtgagatcggacagggtaatttgtttgccatggaaattaaccttcaagccaatctatggcgaagtttcctttattccaatgtggctctgtatctcccagactcgtacaaatacaccccgtccaatgtcactcttccagaaaacaaaaacacctacgactacatgaacgggcgggtggtgccgccatctctagtagacacctatgtgaacattggtgccaggtggtctctggatgccatggacaatgtcaacccattcaaccaccaccgtaacgctggcttgcgttaccgatctatgcttctgggtaacggacgttatgtgcctttccacatacaagtgcctcaaaaattcttcgctgttaaaaacctgctgcttctcccaggctcctacacttatgagtggaactttaggaaggatgtgaacatggttctacagagttccctcggtaacgacctgcgggtagatggcgccagcatcagtttcacgagcatcaacctctatgctacttttttccccatggctcacaacaccgcttccacccttgaagccatgctgcggaatgacaccaatgatcagtcattcaacgactacctatctgcagctaacatgctctaccccattcctgccaatgcaaccaatattcccatttccattccttctcgcaactgggcggctttcagaggctggtcatttaccagactgaaaaccaaagaaactccctctttggggtctggatttgacccctactttgtctattctggttctattccctacctggatggtaccttctacctgaaccacacttttaagaaggtttccatcatgtttgactcttcagtgagctggcctggaaatgacaggttactatctcctaacgaatttgaaataaagcgcactgtggatggcgaaggctacaacgtagcccaatgcaacatgaccaaagactggttcttggtacagatgctcgccaactacaacatcggctatcagggcttctacattccagaaggatacaaagatcgcatgtattcatttttcagaaacttccagcccatgagcaggcaggtggttgatgaggtcaattacaaagacttcaaggccgtcgccataccctaccaacacaacaactctggctttgtgggttacatggctccgaccatgcgccaaggtcaaccctatcccgctaactatccctatccactcattggaacaactgccgtaaatagtgttacgcagaaaaagttcttgtgtgacagaaccatgtggcgcataccgttctcgagcaacttcatgtctatgggggcccttacagacttgggacagaatatgctctatgccaactcagctcatgctctggacatgacctttgaggtggatcccatggatgagcccaccctgctttatcttctcttcgaagttttcgacgtggtcagagtgcatcagccacaccgcggcatcatcgaggcagtctacctgcgtacaccgttctcggccggtaacgctaccacgtaa

SEQ ID NO: 193 - protein, 323 aa, Human adenovirus 35
MTKRVRLSDSFNPVYPYEDESTSQHPFINPGFISPNGFTQSPDGVLTLKCLTPLTTTGGSLQLKVGGGLTVDDTDGTLQENIRATAPITKNNHSVELSIGNGLETQNNKLCAKLGNGLKFNNGDICIKDSINTLWTGINPPPNCQIVENTNTNDGKLTLVLVKNGGLVNGYVSLVGVSDTVNQMFTQKTANIQLRLYFDSSGNLLTEESDLKIPLKNKSSTATSETVASSKAFMPSTTAYPFNTTTRDSENYIHGICYYMTSYDRSLFPLNISIMLNSRMISSNVAYAIQFEWNLNASESPESNIATLTTSPFFFSYITEDDN

SEQ ID NO: 194 - protein, 91 aa, Human adenovirus 35; identical to SEQ ID NO: 122

SEQ ID NO: 195 - protein, 190 aa, Human adenovirus 35
LWTGINPPPNCQIVENTNTNDGKLTLVLVKNGGLVNGYVSLVGVSDTVNQMFTQKTANIQLRLYFDSSGNLLTEESDLKIPLKNKSSTATSETVASSKAFMPSTTAYPFNTTTRDSENYIHGICYYMTSYDRSLFPLNISIMLNSRMISSNVAYAIQFEWNLNASESPESNIATLTTSPFFFSYITEDDN

SEQ ID NO: 196 - protein, 561 aa, Human adenovirus 35
MRRVVLGGAVVYPEGPPPSYESVMQQQQATAVMQSPLEAPFVPPRYLAPTEGRNSIRYSELAPQYDTTRLYLVDNKSADIASLNYQNDHSNFLTTVVQNNDFTPTEASTQTINFDERSRWGGQLKTIMHTNMPNVNEYMFSNKFKARVMVSRKPPDGAAVGDTYDHKQDILEYEWFEFTLPEGNFSVTMTIDLMNNAIIDNYLKVGRQNGVLESDIGVKFDTRNFKLGWDPETKLIMPGVYTYEAFHPDIVLLPGCGVDFTESRLSNLLGIRKKQPFQEGFKILYEDLEGGNIPALLDVDAYENSKKEQKAKIEAATAAAEAKANIVASDSTRVANAGEVRGDNFAPTPVPTAESLLADVSEGTDVKLTIQPVEKDSKNRSYNVLEDKINTAYRSWYLSYNYGDPEKGVRSWTLLTTSDVTCGAEQVYWSLPDMMKDPVTFRSTRQVSNYPVVGAELMPVFSKSFYNEQAVYSQQLRQSTSLTHVFNRFPENQILIRPPAPTITTVSENVPALTDHGTLPLRSSIRGVQRVTVTDARRRTCPYVYKALGIVAPRVLSSRTF

SEQ ID NO: 197 - protein, 952 aa, Human adenovirus 35
MATPSMLPQWAYMHIAGQDASEYLSPGLVQFARATDTYFNLGNKFRNPTVAPTHDVTTDRSQRLMLRFVPVDREDNTYSYKVRYTLAVGDNRVLDMASTFFDIRGVLDRGPSFKPYSGTAYNSLAPKGAPNASQWIAKGVPTAAAAGNGEEEHETEEKTATYTFANAPVKAEAQITKEGLPIGLEISAENESKPIYADKLYQPEPQVGDETWTDLDGKTEEYGGRALKPTTNMKPCYGSYAKPTNLKGGQAKPKNSEPSSEKIEYDIDMEFFDNSSQRTNFSPKIVMYAENVGLETPDTHVVYKPGTEDTSSEANLGQQSMPNRPNYIGFRDNFIGLMYYNSTGNMGVLAGQASQLNAVVDLQDRNTELSYQLLLDSLGDRTRYFSMWNQAVDSYDPDVRVIENHGVEDELPNYCFPLDGIGVPTTSYKSIVPNGEDNNNWKEPEVNGTSEIGQGNLFAMEINLQANLWRSFLYSNVALYLPDSYKYTPSNVTLPENKNTYDYMNGRVVPPSLVDTYVNIGARWSLDAMDNVNPFNHHRNAGLRYRSMLLGNGRYVPFHIQVPQKFFAVKNLLLLPGSYTYEWNFRKDVNMVLQSSLGNDLRVDGASISFTSINLYATFFPMAHNTASTLEAMLRNDTNDQSFNDYLSAANMLYPIPANATNIPISIPSRNWAAFRGWSFTRLKTKETPSLGSGFDPYFVYSGSIPYLDGTFYLNHTFKKVSIMFDSSVSWPGNDRLLSPNEFEIKRTVDGEGYNVAQCNMTKDWFLVQMLANYNIGYQGFYIPEGYKDRMYSFFRNFQPMSRQVVDEVNYKDFKAVAIPYQHNNSGFVGYMAPTMRQGQPYPANYPYPLIGTTAVNSVTQKKFLCDRTMWRIPFSSNFMSMGALTDLGQNMLYANSAHALDMTFEVDPMDEPTLLYLLFEVFDVVRVHQPHRGIIEAVYLRTPFSAGNATT

SEQ ID NO: 198 - protein, 42 aa, Human adenovirus 35; identical to SEQ ID NO: 36

SEQ ID NO: 199 - DNA, 35343 bp, Human mastadenovirus B
ctatctatataatataccttatagatggaatggtgccaacatgtaaatgaggtaatttaaaaaagtgcgcgctgtgtggtgattggctgcggggttaacggctaaaaggggcggcgcgaccgtgggaaaatgacgtgacttatgtgggaggagttatgttgcaagttattacggtaaatgtgacgtaaaacgaggtgtggtttgaacacggaagtagacagttttcccacgcttactgacaggatatgaggtagttttgggcggatgcaagtgaaaattctccattttcgcgcgaaaactaaatgaggaagtgaatttctgagtcatttcgcggttatgccagggtggagtatttgccgagggccgagtagactttgaccgtttacgtggaggtttcgattaccgtgtttttcacctaaatttccgcgtacggtgtcaaagttctgtgtttttacgtaggtgtcagctgatcgctagggtatttaaacctgacgagttccgtcaagaggccactcttgagtgccagcgagaagagttttctcctccgcgccgcaagtcagttctgcgctttgaaaatgagacacctgcgcttcctgccacaggaggttatctccagtgagaccgggatcgaaatactggagtttgtggtaaataccctaatgggagacgacccggaaccgccagtgcagcctttcgatccacctacgctgcacgatctgtatgatttagagatagacgggccggaggatcccaatgaggaagctgtgaatgggttttttactgattctatgctgctagctgctgatgaaggattggacataaaccctcctcctgagacacttgttaccccaggggtggttgtggaaagcggcataggtgggaaaaaattgcctgatctgggagcagctgaaatggacttgcgttgttatgaagagggttttcctcccagtgatgatgaagatggggaaactgagcagtccatccataccgcagtaaatgagggagtaaaagctgccagcgatgtttttaagttggactgtccggagctgcctggacatggctgtaagtcttgtgaatttcacaggaataacactggaatgaaagaactattgtgctcgctttgctatatgagaatgcactgccactttatttacagtaagtgtatttaagtgaaatttaaaggaatagtgtagctatttaataactgttgaatggtagatttatgtttttttcttgcgattttttgtaggtcctgtgtctgatgatgagtcaccttctcctgattcaactacctcacctcctgaaattcaggcgcccgcacctgcaaacgtatgcaagcccattcctgtgaagcctaagcctgggaaacgccctgctgtggataagcttgaggacttgttggagggtggggatggacctttggaccttagtacccggaaactgccaaggcaatgagtgccctgcagctgtgtttatttaatgtgacgtcatgtaataaaattatgtcagctgctgagtgttttattacttcttgggtggggacttggatatataagtaggagcagatctgtgtggttagctcacagcaacctgctgccatccatggaggtttgggctatcttggaagacctcagacagactaagctactgctagaaaacgcctcggacggagtctctggcctttggagattctggttcggtggtgatctagctaggctagtgtttaggataaaacaggactacagggaagaatttgaaaagttattggacgatagtccgggactttttgaagctcttaacttgggtcatcaggctcattttaaggagaaggttttatcagttttagatttttctactcctggtagaactgctgctgctgtagcttttcttacttttatattggataaatggatccgccaaactcacttcagcaagggatacgttttggatttcatagcagcagctttgtggagaacatggaaggctcgcaggatgaggacaatcttagattactggccagtgcagcctctgggagtagcagggatactgagacacccaccgaccatgccagcggttctgcaggaggagcagcaggaggacaatccgagagccggcctggaccctccggtggaggagtagctgacctgtttcctgaactgcgacgggtgcttactaggtctacgaccagtggacagaacaggggaattaagagggagaggaatcctagtgggaataattcaagaaccgagttggctttaagtttaatgagccgcaggcgtcctgaaactgtttggtggcatgaggttcagagcgaaggcagggatgaagtttcaatattgcaggagaaatattcactagaacaacttaagacctgttggttggaacctgaggatgattgggaggtggccattaggaattatgctaagatatctctgaggcctgataaacaatatagaattactaagaagattaatattagaaatgcatgctacatatcagggaatggggcagaggttataatagatacacaagataaagcagtttttagatgttgtatgatgggtatgtggccaggggttgtcggcatggaagcagtaacacttatgaatattaggtttaaaggggatgggtataatggcattgtatttatggctaacactaagctgattctacatggttgtagcttttttgggtttaataatacgtgtgtagaagcttgggggcaagttagtgtgaggggttgtagtttttatgcatgctggattgcaacatcaggtagggtcaagagtcagttgtctgtgaagaaatgcatgtttgagagatgtaatcttggcatactgaatgaaggtgaagcaagggtccgccactgcgcagctacagaaactggctgcttcattctaataaagggaaatgccagtgtgaagcataatatgatctgtggacattcggatgagaggccttatcagatgctgacctgcgctggtggacattgcaatattcttgctaccgtgcatatcgtttcacatgcacgcaaaaaatggcctgtatttgaacataatgtgattaccaagtgcaccatgcacataggtggtcgcaggggaatgtttatgccttaccagtgtaacatgaatcatgtgaaggtaatgttggaaccagatgccttttccagagtgagcttaacaggaatctttgatatgaatattcaactatggaagatcctgagatatgatgacactaaaccaagggtgcgcgcatgcgaatgcggaggcaagcatgctagattccagccggtgtgcgtggatgtgactgaagacttgagacccgatcatttggtgcttgcctgcactggagcggagttcggttctagtggtgaagaaactgactaaagtgagtagtggggcaagatgtggatggggactttcaggttggtaaggtgggcagattgggtaaattttgttaatttctgtcttgcagctgccatgagtggaagcgcttcttttgaggggggagtatttagcccttatctgacgggcaggctcccaccatgggcaggagttcgtcagaatgtcatgggatccactgtggatgggagacccgtccagcccgccaattcctcaacgctgacctatgccactttgagttcgtcaccattggatgcagctgcagccgccgccgctactgctgccgccaacaccatccttggaatgggctattatggaagcatcgttgccaattccagttcctctaataacccttcaaccctggctgaggacaagctacttgttctcttggcgcagctcgaggccttaacccaacgcttaggcgaactgtctaagcaggtggcccagttgcgtgagcaaactgagtctgctgttgccacagcaaagtctaaataaagatctcaaatcaataaataaagaaatacttgatataaaacaaatgaatgtttatttgatttttcgcgcgcggtatgccctggaccatcggtctcgatcattgagaacgcggtggatcttttccagtaccctgtaaaggtgggattgaatgtttagatacatgggcattagtccgtctcgggggtggagatagctccattgaagagcctcttgctccggggtagtgttataaatcacccagtcatagcaaggtcggagtgcatggtgttgcacaatatcttttaggagcagactaattgcaacggggaggcccttagtgtaggtgtttacaaatctgttgagctgggacgggtgcatccggggtgaaattatatgcattttggactggatcttgaggttggcaatgttgccgcctagatcccgtctcgggttcatattgtgcaggaccaccaagacagtgtatccggtgcacttgggaaatttatcatgcagcttagagggaaaagcatgaaaaaatttggagacgcctttgtgaccccccagattctccatgcactcatccataatgatagcgatggggccgtgggcagcggcacgggcgaacacgttccgggggtctgaaacatcatagttatgctcctgagtcaggtcatcataagccattttaataaactttgggcggagggtgccagattgggggatgaaagttccctctggcccgggagcatagtttccctcacatatttgcatttcccaggctttcagttcagagggggggatcatgtccacctgcggggctataaaaaataccgtttctggagccggggtgattaactgggacgagagcaaattcctaagcagctgagacttgccgcacccagtgggaccgtaaatgaccccaattacgggttgcagatggtagtttagggaacgacagctgccgtcctcccggagcaggggggccacttcgttcatcatttcccttacatggatattttcccgcaccaagtccgttaggaggcgctctcccccaagggatagaagctcctggagcgaggagaagtttttcagcggcttcagcccgtcagccatgggcattttggaaagagtctgttgcaagagctcgagccggtcccagagctcggtgatgtgctctatggcatctcgatccagcagacctcctcgtttcgcgggttgggacggctcctggagtagggaatcagacgatgggcgtccagcgctgccagggtccgatccttccatggtcgcagcgtccgagtcagggttgtttccgtcacggtgaaggggtgcgcgcctggttgggcgcttgcgagggtgcgcttcagactcatcctgctggtcgagaaccgctgccgattggcgccctgcatgtcggccaggtagcagtttaccatgagttcgtagttgagcgcctcggccgcgtggcctttggcacggagcttacctttggaagttttatggcaggcggggcagtagatacatttgagggcatacaacttgggcgcgaggaaaatggattcgggggagtatgcatccgcaccgcaggaggcgcagacggtttcgcactccacgagccaggtcagatccggctcatcggggtcaaaaacaagttttccgccatgttttttgatgcgtttcttacctttggtttccatgagttcgtgtccccgctgggtgacaaagaggctgtccgtgtccccgtagaccgactttatgggcctgtcctcgagcggagtgcctcggtcctcttcgtagaggaacccagcccactctgatacaaaagcgcgtgtccaggccagcacaaaggaggccacgtgggaggggtagcggtcgttgtcaaccagggggtccaccttctctacggtatgtaaacacatgtccccctcctccacatccaagaatgtgattggcttgtaagtgtaggccacgtgaccaggggtccccgccgggggggtataaaagggggcgggcctctgttcgtcctcactgtcttccggatcgctgtccaggagcgccagctgttggggtaggtattccctctcgaaggcgggcatgacctctgcactcaggttgtcagtttctaggaacgaggaggatttgatattgacagtaccagcagagatgcctttcataagactctcgtccatctggtcagaaaacacaatcttcttgttgtccagcttggtggcaaatgatccatagagggcattggatagaagcttggcgatggagcgcatggtttggttcttttccttgtccgcgcgctccttggcggtgatgttaagctggacgtactcgcgcgccacacatttccattcaggaaagatggttgtcagttcatccggaactattctgattcgccatcccctattgtgcagggttatcagatccacactggtggccacctcgcctcggaggggctcattggtccagcagagtcgacctccttttcttgaacagaaaggggggagggggtctagcatgaactcatcaggggggtccgcatctatggtaaatattcccggtagcaaatctttgtcaaaatagctgatggtggcgggatcatccaaggtcatctgccattctcgaactgccagcgcgcgctcataggggttaagaggggtgccccagggcatggggtgggtgagcgcggaggcatacatgccacagatatcgtagacatagaggggctcttcgaggatgccgatgtaagtgggataacatcgcccccctctgatgcttgctcgcacatagtcatagagttcatgtgagggggcaagaagacccgggcccagattggtgcggttgggtttttccgccctgtaaacgatctggcgaaagatggcatgggaattggaagagatagtaggtctctggaatatgttaaaatgggcatgaggtaagcctacagagtcccttatgaagtgggcatatgactcttgcagcttggctaccagctcggcggtgatgagtacatccagggcacagtagtcgagagtttcctggatgatgtcataacgcggttggcttttcttttcccacagctcgcggttgagaaggtattcttcgtgatccttccagtactcttcgaggggaaacccgtctttttctgcacggtaagagcccaacatgtagaactgattgactgccttgtagggacagcatcccttctccactgggagagagtatgcttgggctgcattgcgcagcgaggtatgagtgagggcaaaagtgtccctgaccatgactttgaggaattgatacttgaagtcgatgtcatcacaggccccctgttcccagagttggaagtccacccgcttcttgtaggcggggttgggcaaagcgaaagtaacatcattgaagaggatcttgccggccctgggcatgaaatttcgggtgattttgaaaggctgaggaacctctgctcggttattgataacctgagcggccaagacgatctcatcaaagccattgatgttgtgccccactatgtacagttctaagaatcgaggggtgcccctgacatgaggcagcttcttgagttcttcaaaagtgagatctgtagggtcagtgagagcatagtgttcgagggcccattcgtgcacgtgagggttcgctttaaggaaggaggaccagaggtccactgccagtgctgtttgtaactggtcccggtactgacgaaaatgctgtccgactgccatcttttctggggtgacgcaatagaaggtttgggggtcctgccgccagcgatcccacttgagttttatggcgaggtcataggcgatgttgacgagccgctggtctccagagagtttcatgaccagcatgaaggggattagctgcttgccaaaggaccccatccaggtgtaggtttccacatcgtaggtgagaaagagcctttctgtgcgaggatgagagccaatcgggaagaactggatctcctgccaccagttggaggaatggctgttgatgtgatggaagtagaactccctgcgacgcgccgagcattcatgcttgtgcttgtacagacggccgcagtactcgcagcgattcacgggatgcaccttatgaatgagttgtacctgacttcctttgacgagaaatttcagtggaaaattgaggcctggcgcttgtacctcgcgctttactatgttgtctgcatcggcatgaccatcttctgtctcgatggtggtcatgctgacgagccctcgcgggaggcaagtccagacctcggcgcggcaggggcggagctcgaggacgagagcgcgcaggccggagctgtccagggtcctgagacgctgcggagtcaggttagtaggcagtgtcaggagattaacttgcatgatcttttggagggcgtgagggaggttcagatagtacttgatctcaacgggtccgttggtggagatgtcgatggcttgcagggttccgtgtcccttgggcgctaccaccgtgcccttgtttttcattttggacggcggtggctctgttgcttcttgcatgtttagaagcggtgtcgagggcgcgcaccgggcggcaggggcggctcgggacccggcggcatggctggcagtggtacgtcggcgccgcgcgcgggtaggttctggtactgcgccctgagaagactcgcatgcgcgacgacgcggcggttgacatcctggatctgacgcctctgggtgaaagctaccggccccgtgagcttgaacctgaaagagagttcaacagaatcaatctcggtatcgttgacggcggcttgcctaaggatttcttgcacgtcgccagagttgtcctggtaggcgatctcggccatgaactgctcgatctcttcctcttgaagatctccgcggcccgctctctcgacggtggccgcgaggtcgttggagatgcgcccaatgagttgagagaatgcattcatgcccgcctcgttccagacgcggctgtagaccacagcccccacgggatctctcgcgcgcatgaccacctgggcgaggttgagctccacgtggcgggtgaagaccgcatagttgcataggcgctggaaaaggtagttgagtgtggtggcgatgtgctcggtgacgaagaaatacatgatccatcgtctcagcggcatctcgctgacatcgcccagcgcttccaagcgctccatggcctcgtagaagtccacggcaaagttaaaaaactgggagttacgcgcggacacggtcaactcctcttccagaagacggataagttcggcgatggtggtgcgcacctcgcgctcgaaagcccctgggatttcttcctcaatctcttcttcttccactaacatctcttcctcttcaggtggggctgcaggaggagggggaacgcggcgacgccggcggcgcacgggcagacggtcgatgaatctttcaatgacctctccgcggcggcggcgcatggtctcggtgacggcacgaccgttctccctgggtctcagagtgaagacgcctccgcgcatctccctgaagtggtgactgggaggctctccgttgggcagggacaccgcgctgattatgcattttatcaattgccccgtaggtactccgcgcaaggacctgatcgtctcaagatccacgggatctgaaaacctttcgacgaaagcgtctaaccagtcgcaatcgcaaggtaggctgagcactgtttcttgcgggcgggggcggctagacgctcggtcggggttctctctttcttctccttcctcctcttgggagggtgagacgatgctgctggtgatgaaattaaaataggcagttttgagacggcggatggtggcgaggagcaccaggtctttgggtccggcttgttggatacgcaggcgatgagccattccccaagcattatcctgacatctggccagatctttatagtagtcttgcatgagtcgttccacgggcacttcttcttcgcccgctctgccatgcatgcgagtgatcccgaacccgcgcatgggctggacaagtgccaggtccgctacaaccctttcggcgaggatggcttgctgcacctgggtgagggtggcttggaagtcgtcaaagtccacgaagcggtggtaggccccggtgttgattgtgtaggagcagttggccatgactgaccagttgactgtctggtgcccagggcgcacgagctcggtgtacttgaggcgcgagtatgcgcgggtgtcaaagatgtaatcgttgcaggtgcgcaccaggtactggtagccaatgagaaagtgtggcggtggctggcggtacaggggccatcgctctgtagccggggctccgggggcgaggtcttccagcatgaggcggtggtagccgtagatgtacctggacatccaggtgataccggaggcggtggtggatgcacgtgggaactcgcgcacgcggttccagatgttgcgcagcggcatgaagtagttcatggtaggcacggtctggccagtgaggcgcgcgcagtcattgacgctctgtagacacggagaaaacgaaagcgatgagcggctcgactccgtggtctgggggaacgtgaacgggttgggtcgcggtgtaccccggttcgagtccaaagctaagcgatcacgctcggatcggccggagccgcggctaacgtggtattggctatcccgtctcgacccagccgacgaatatccagggtacggagtagagtcgtttttgctgctttttcctggacgtgtgccattgccacgtcaagctttagaacgctcagttctcgggccgtgagtggctcgcgcccgtagtctggagaatcagtcgccagggttgcgttgcggtatgccccggttggagcctaagcgcggctcgtatcggccggtttccgcgacaagcgagggtttggcagccccgttatttccaagaccccgccagccgacttctccagtttacgggagcgagcccttttttttttttttttgtttttgtcgcccagatgcatccagtgctgcgacagatgcgcccccagcaacaggccccttctcagcaacagccacaaaaggctcttcttgctcctgcaactactgcagctgcagccgtgagcggcgcgggacagcccgcctatgatctggacttggaagagggcgagggattggcgcgcctgggggctccatcgcccgagcggcacccgcgggtgcaactaaaaaaggactctcgcgaggcgtacgtgccccagcagaacctgttcagggacaggagcggcgaggagccagaggagatgcgagcatctcgatttaacgcgggtcgcgagctgcgccacggtctggatcgaagacgggtgctgcaagacgaggattttgaggtcgatgaagtcacagggatcagcccagctagggcacatgtggccgcggccaacctagtctcggcctacgagcagaccgtgaaggaggagcgcaacttccaaaaatcttttaacaaccatgtgcgcaccctgatcgcccgcgaggaagtgaccctgggtctgatgcatctgtgggacctgatggaggctatcgcccaaaaccccactagcaaaccactgacagctcagctgtttctggtggttcaacatagcagggacaacgaggcattcagggaggcgttgttgaacatcaccgagcctgatgggagatggctgtatgatctgatcaacatcctgcaaagtattatagtgcaggaacgtagcctgggtttggctgagaaagtggcagctatcaactactcggtcttgagcctgggcaaatactacgctcgcaagatctacaagaccccctacgtacccatagacaaggaggtgaagatagatgggttttacatgcgcatgactctgaaggtgctgactctgagcgacgatctgggggtgtatcgcaatgacaggatgcaccgcgcggtgagcgccagcaggaggcgcgagctgagcgacagagaacttatgcacagcttgcaaagagctctaacgggggccgggactgatggggagaactactttgacatgggagcggatttgcaatggcaacccagtcgcagggccatggaggctgcagggtgtgagcttccttacatagaagaggtggatgaagtcgaggacgaggagggcgagtacttggaagactgatggcgcgacccgtatttttgctagatggaacagcagcaggcaccggaccccgcaatgcgggcggcgctgcagagccagccgtccggcattaactcctcggacgattggacccaggccatgcaacgcataatggcgctgacgacccgcaaccccgaagcctttagacagcaaccccaggccaaccgcctttctgccatactggaggccgtagtgccctcccgctccaaccccacccacgagaaggtcctggctatcgtgaacgcgctggtggagaacaaggccatccgtcccgatgaggccgggctggtatacaatgctctcttggagcgcgtggcccgttacaacagcagcaacgtgcaaaccaacctggaccggatggtgaccgatgtgcgcgaggccgtgtctcagcgcgagcgattccagcgcgacgccaacttggggtcgttggtagcgctaaacgctttcctcagcacccagcccgccaacgtgccccgtggtcagcaagactatacaaactttttgagtgcattgagactcatggtagctgaggtgccccagagcgaggtgtaccagtccgggccagattacttcttccagaccagcagacagggcttgcagacagtgaacctgactcaggctttcaagaacctgaagggtctgtggggagtgcacgccccagtaggggatcgcgcgaccgtgtctagcttgctgactcccaactcccgcctgctgctgctgctggtatccccctttactgacagcggtagcattgaccgcaactcgtacttgggctacctgcttaacctgtatcgcgaggccataggacagagccaggtggacgagcagacctatcaagaaatcacccaagtgagccgcgccctgggtcaggaagacacgggcagtttggaagccaccctgaacttcttgctaaccaaccggtcacagaagatccctcctcagtatgcgcttaccgctgaggaggagcggatcctcagatacgtgcaacagagcgttggactgttcctgatgcaggagggggcgacacctaccgccgcgctggacatgacagctcgaaacatggagcccagcatgtatgctagtaacaggcctttcattaacaaactgctggactacctgcacagggcggccgccatgaactctgattatttcaccaatgctatcctgaacccacactggctgcccccacctggtttctacactggcgagtacgacatgcccgaccccaatgacgggttcctgtgggacgatgtggacagcagcatattttccccgcctcccggttatacagtttggaagaaggaagggggcgatagaagacactcttccgtgtcgctatccggaacggctggtgctgccgcgaccgtgcccgaagctgcaagtcctttccctagcttgcccttttcactaaacagcgttcgcagcagtgaactggggagaataacccgcccgcgcttgatgggcgaggatgagtacttgaatgactctttgctgaggccagagagggaaaagaacttccccaacaatggaatagagagtctggtggataagatgagtagatggaagacctatgcgcaggatcacagagacgagcccaggatcttgggggctacaagcagaccgatccgtagacgccagcgccacgacaggcagatgggtcttgtgtgggacgatgaggactctgccgatgatagcagcgtgttggacttgggtggaagaggagggggcaacccgttcgctcatctgcgtcccagattcgggcgcatgttgtaaaagtgaaagtaaaataaaaaggcaactcaccaaggccatggcgaccgagcgtgcgttcgttcttttttgttatctgtgtctagtacgatgaggagacgagccgtgctaggcggagcggtggtgtatccggagggtcctcctccttcttacgagagcgtgatgcagcaacaggcggcgatgatacagcccccactggaggctcccttcgtacccccacggtacctggcgcctacggaagggagaaacagcattcgttactcggagctgtcgcccctgtacgataccaccaagttgtatctggtggacaacaagtcggcggacatcgcctccctgaactatcagaacgaccacagcaacttcctgaccacggtggtgcagaacaatgactttacccccacggaggctagcacccagaccatcaactttgacgagcggtcgcgatggggcggtcagctgaagaccatcatgcacaccaacatgcccaacgtgaacgagtacatgttcagcaacaagttcaaggcgagggtgatggtgtccagaaaagctcctgaaggtgttacagtaaatgacacctatgatcataaagaggatatcttgaagtatgagtggtttgagttcattttaccagaaggcaacttttcagccaccatgacgatcgacctgatgaacaatgccatcattgacaactacctggaaattggcagacagaatggagtgctggaaagtgacattggtgttaagtttgacactagaaatttcaggctcgggtgggaccccgaaactaagttgattatgccaggtgtctacacttatgaggcattccatcctgacattgtattgctgcctggttgcggggtagactttactgaaagccgacttagcaacttgcttggcatcaggaagagacatccattccaggagggtttcaaaatcatgtatgaagatcttgaagggggtaatattcctgcccttttggatgtcactgcctatgaggaaagcaaaaaggataccactactgaaacaaccacactggctgttgcagaggaaactagtgaagatgatgatataactagaggagatacctatataactgaaaaacaaaaacgtgaagctgcagctgctgaagttaaaaaagagttaaagatccaacctctagaaaaagacagcaagagtagaagctacaatgtcttggaagacaaaatcaacacagcctaccgcagttggtacctgtcctacaattacggtaaccctgagaaaggaataaggtcttggacactgctcaccacttcagatgtcacctgtggggcagagcaggtctactggtcgctccctgacatgatgcaagacccagtcaccttccgctccacaagacaagtcaacaactacccagtggtgggtgcagagcttatgcccgtcttctcaaagagtttctacaatgagcaagccgtgtactctcagcagctccgacaggccacttcgctcacgcacgtcttcaaccgcttccctgagaaccagatcctcatccgcccgccggcgcccacaattaccaccgtcagtgaaaacgttcctgctctcacagatcacgggaccctgccgttacgcagcagtatccggggagtccagcgcgtgaccgttactgacgccagacgccgcacctgtccctacgtttacaaggccctgggcatagtcgcgccgcgcgttctttcaagccgcactttctaaaaaaaaaaaaaatgtccattctcatctcgcccagtaataataccggttggggactgtatgcgcccaccaagatgtatggaggcgcccgcaagcgctctacccagcatcctgtgcgcgttcgcggtcatttccgcgctccctggggcgcactcaagggtcgtacccgcactcggaccacggtcgatgatgtgatcgaccaggtggtcgccgatgctcgtaattatactcctactgcgcctacatctactgtggatgcagttattgacagtgtggtggcagacgcccgcgcctatgctcgccggaagagccgaaggaggcgcatcgccaggcgccacagggctactcccgccatgcgagccgcaaaagctattctgcggagggccaaacgtgtggggcgaagagccatgcttagagcggccagacgcgcggcttcaggtgccagcagcggcaggtcccgcaggcgcgcggccacggcggcagcagcggccattgccaacatggcccaaccgcgaagaggcaatgtgtactgggtgcgtgatgccactaccggccagcgcgtgcccgtgcgcacccgcccccctcgcacttagaagatactgagcagtctccgatgttgtgtcccagcggcaagtatgtccaagcgcaaatacaaggaagagatgctccaggtcatcgcgcctgaaatctacggtccgccggtgaaggatgaaaaaaagccccgcaaaatcaagcgggtcaaaaataacaaaaaggaagaagatgacgatgatgggctggtggagtttgtgcgcgagttcgccccaagacggcgcgtgcagtggcgcgggcgcaaagtgcgtcaagtgctcagacccgggaccactgtggtttttacacctggcgagcgttccagcactacttttaaacggtcctatgatgaggtgtacggggatgacgatattcttgagcaggcggcagaccgccttgacgagtttgcttatggcaagcgcactagatccagtcccaaagaggaggctgtgtccattcctttggatcatggaaatcccacccccagcctcaaaccagtcaccctgcagcaagtgctgcccgtgcctgcgcggagaggcgtaaagcgcgagggtgaggacctatatcccaccatgcagctaatggtgcccaagcgccagaggctagaagacgtactggagaaaatgaaagtggatgccgatatccagcctgaggtcaaagtaagacctatcaaggaagtggcgccaggtttgggagtacaaaccttcgacatcaagattcccaccgagtccatggaagtgcagaccgaacctgcaaaacccaccacctcaattgaggtgcaaacggaaccctggatgcccgcgcccgttgccgcccccagcaccactcgaagatcacgacgaaagtacggcccagcaagtctgctaatgcccaactatgctctgcacccatccatcattcccactccgggttacagaggcactcgctactatcgaaaccggagcaacacctctcgccgccgcaaaccacctgcaagtcgcactcgccgtcgccgccgccgcaacactgccagcaaattgactcccgccgccctggtgcggagagtgtaccgcgatggtcgcgctgaacctctgacgctgccgcgcgcgcgctaccatccaagcatcaccacttaatgactgttgacgctgcctccttgcagatatggccctcacttgccgccttcgcgtccccattactggctaccgaggaagaaactcgcgccgtagaaggatgttggggcgagggatgcgccgccacagacgaaggcgcgctatcagcagacgattagggggtggctttttgccagctcttatacccatcatcgccgcagcgatcggggcgataccaggcatagcttcagtggcggttcaggcctcgcagcgccactaacattggaaaaaacttataaataaaaaatagaatggactctgacgctcctggtcctgtgactatgtttttgtagagatggaagacatcaatttttcatccctggctccgcgacacggcacgaggccgtacatgggcacctggagcgacatcggcacgagccaactgaacgggggcgccttcaattggagcagtatctggagcgggcttaaaaattttggctcgaccgtaaaaacctatgggaacaaagcttggaacagcagcacagggcaggctctgagaaataagcttaaggaacaaaacttccaacagaaggtggtcgatgggatcgcctctggtattaacggcgtagtggatctggccaaccaggctgtacaaaaacagataaacagccgcctggacccgccgcccgcaacccctggtgaaatggaagtggaggaagaacttcctccgctggaaaagcggggcgacaagcgtccgcgacccgagctagagcagacgctggtgacgcgcgcagacgagcccccttcatatgaggaggcagtaaagctcggaatgcccactaccaggcctgtagctcacatggctaccggggtgatgaaaccttctcagtcacatcgacccgccaccttggacttgcctcctccccctgcttctgcggcgcctgttcccaaacctgtcgctaccagaaagcccaccgccgtacagcccgtcgccgtagccagaccgcgtcctgggggcacaccgcgcccgaaagcaaactggcaaagtactctgaacagcatcgtgggtctgggcgtgcagagtgtaaagcgccgtcgctgctattaattaaatatggagtagcgcttaacttgcttgtctgtgtgtatgtatcatcaccacgccgccgcagcagaggagaaaggaagaggtcgcgcgccgaggctgagttgctttcaagatggccaccccatcgatgatgccccaatgggcatacatgcacatcgccggacaggatgcttcggagtacctcagtccgggtctggtgcagttcgcccgtgcaacagacacctacttcagtatggggaacaaatttagaaaccccacagtggcgcccacccacgatgtgaccaccgaccgtagccagcgcctgatgctgcgcttcgtgcccgttgaccgggaagacaatacctactcttacaaagttcgctacacgctggctgtaggcgacaacagagtgcttgacatggccagcacattctttgacattcggggggtgcttgatagaggtcctagcttcaagccatattccggcacagcttacaattcactcgctcctaagggcgcgcccaatacatctcagtggatagttacaacaaatggggacaatgcagtaactaccaccacaaacacatttggcattgcttccatgaagggagacaatattactaaagaaggtttgcaaattgggaaagacattaccactactgaaggagaagaaaagcccatttatgccgataaaacatatcagccagagcctcaagttggagaagaatcatggactgatactgatggaacaaatgaaaagtttggtggaagagcccttaaaccagctaccaacatgaagccatgctacgggtcttttgcaagacctacaaacataaaagggggccaagctaaaaacagaaaagtaaaaccaacaaccgaaggaggggttgaaactgaggaaccagatattgatatggaatttttcgatggtagagatgctgttgcaggagctttagcgcctgaaattgtgctttatacggaaaatgtaaatttggaaactccagacagtcatgtggtatataaaccagaaacgtctaataactctcatgcaaatttgggtcaacaagccatgcctaacagacccaattacattggcttcagggataacttcgtaggcctaatgtactacaacagtactggaaatatgggagttttggctggccaagcatcacaactgaatgcagtggttgacttgcaggacagaaatactgaactgtcatatcagcttttgcttgattctctgggagacagaaccagatacttcagcatgtggaatcaggctgtggacagttacgatcccgatgttcgcattattgaaaatcatggcatcgaggatgaactgcctaattactgttttcctctgaatggcataggaccagggcacacatatcaaggcattaaagttaaaaccgatgacactaatggatgggaaaaagatgctaatgttgctccagctaatgaaataaccataggcaacaacctggctatggaaattaatatccaagctaacctttggagaagttttctgtactctaatgtggctttgtaccttccagatgtttacaagtacacgccacctaacattactttgcccactaacaccaacacctatgagtacatgaacgggcgagtggtatccccatccctggttgattcatacatcaacattggcgccaggtggtctcttgacccaatggacaatgtgaatccattcaaccaccaccgcaatgctggtctgcgctacaggtccatgcttctgggaaatggtcgttatgtgcctttccacatacaagtgcctcagaaattctttgctgtcaagaacctacttcttctacctggctcctacacctacgagtggaacttccgaaaggatgtgaacatggtcctgcaaagttcccttggaaatgacctcagaacggatggtgctaccataagtttcaccagcatcaatctctatgccaccttcttccccatggctcacaacacagcttccacccttgaagccatgctgcgcaacgataccaatgatcagtcatttaacgactacctctctgcagctaacatgctttaccccattcctgccaatgcaaccaacattccaatttccatcccatctcgcaactgggcagccttcaggggctggtccttcaccagactcaaaaccaaggagactccatctcttggatcagggttcgatccctacttcgtatattctggatctattccctacctggatggcaccttttaccttaaccacactttcaagaaggtctccatcatgtttgactcctcagtcagctggcctggcaatgacaggctgttgagtccaaatgagtttgaaatcaagcgcactgtggacggggaaggatacaacgtggcacaatgcaacatgaccaaagactggttcctggttcagatgcttgccaattacaacattggctaccagggcttttacatccctgagggatacaaggatcgcatgtactcctttttcagaaacttccagcctatgagcaggcaggtggttgatgaggttaattacactgactacaaagccgtcaccttaccataccaacacaacaactctggctttgtagggtaccttgcacctactatgagacaaggggaaccttacccagccaattatccatacccgctcatcggaactactgccgttaagagtgtcacccagaaaaagttcctgtgcgacaggaccatgtggcgcattcccttctccagcaacttcatgtccatgggggcccttaccgacctgggacagaacatgctctatgccaactcagcccatgcgctggacatgacttttgaggtggatcccatggatgagcccaccctgctttatcttcttttcgaagtcttcgacgtggtcagagtgcaccagccacaccgcggcgtcatcgaggccgtctacctgcgcacaccgttctcggccggcaacgccaccacataagaagcctcttgcttcttgcaagcagcagctgcagccatgacatgcgggtccggaaacggctccagcgagcaagagctcaaagccatcgtccgagacctgggctgcggaccctatttcctgggaacctttgacaagcgtttcccggggttcatggcccccgacaagctcgcctgcgccatagtcaacactgccggacgcgagacggggggagagcactggctggcttttggttggaacccgcgctacaacacctgctacctttttgatccttttgggttctcggatgagcggctcaaacagatttaccagtttgagtacgaggggctcctgcgtcgcagtgcccttgctaccaaagaccgctgcatcaccctggagaagtctacccaaagcgtgcagggtccgcgctcagccgcctgtggacttttttgctgtatgttccttcatgcctttgtgcactggcccgaccgccccatggacggaaaccccaccatgaagttgctgactggggtgtccaacagcatgctccaatcaccccaagtccagcccaccctgcgccgcaaccaggaggtgctataccgcttcctaaacacccactcatcttactttcgttctcaccgcgcgcgcattgaaagggccaccgcgtttgaccgtatggatatgcaataagtcatgtaaaaccgtgttcaataaacagcactttatttttacatgcactgaggctctggttttgctcatttgtttcatcatttactcagaagtcgaatgggttctggcgggagtcagagtgacccgcgggcagggatacgttgcggaactgtaacctgttctgccacttgaactcggggattaccagcttgggaactggaatctcgggaaaggtgtcttgccacaactttctggtcagttgcatagcgccaagcaggtcaggagcagagatcttgaaatcacagttggggccggcattctggacacgggagttgcgatacactgggttgcaacactggaacactatcaacgctgggtgtcttacgcttgccaacacggttgggtcactgatggtagtcacatccaagtcttcagcattggccatcccaaagggggtcatcttacatgtctgcctgcccatcacgggagcgcagcctggcttgtggttgcaatcacaatgaatggggatcagcatcatcctggcttggtcgggagttatccctgggtacacagccttcatgaaggcttcgtactgcttaaaagcttcctgggccttacttccctcggtgtagaacatcccacaggacttgctggaaaattgattagtagtacagttggcatcattcacacaacagcgggcatcgttgttggccaactgaaccacatttctgccccagcggttttgggtgatcttggctctgtctggattctccttcatagcgcgctgcccgttctcgctcgccacatccatctcgataatgtggtccttctggatcatgatagtgccatgcaggcatttcaccttgccttcataatcggtgcatccatgagcccacagagcgcacccggtgcactcccaattattgtgggcgatctcagaataataatgtaccaatccctgcatgaatcttcccatcattgttgtcaaggtcttcatgctggtaaatgtcagcgggatgccacggtgctcctcgttcacatactggtggcagatacgcttgtattgctcgtgctgctctggcatcagcttgaaagaggttctcagatcattatccagcctgtacctttccattagcacagccatcacttccatgcccttctcccaggcagataccaggggcagactcaaaggattcctaacagcaataaaagtagctcctttagctatagggtcattcttgtcgatcttctcaacacttctcttgccatccttctcaatgatgcgcaccggggggtagctgaagcccacggccaccaactgagcctgttctctttcttcttcactatcctggctgatgtcttgcagagggacatgcttggtcttcctgggcttcttcttgggagggatcgggggaggactgttgctccgctccggagacagggatgactgcgaagtttcgcttaccaataccacctggctctcggtagaagaaccggaccccacacgacggtaggtgttcctcttcgggggcagaggtggaggcgactgagatgggctgcggtctggccttggaggcggatggctggcagagctcattccgcgttcgggggtgtgctcccggtggcggtcgcttgactgatttcctccgcggctggccattgtgttctcctaggcagagaaacaacagacatggaaactcagccatcactgccaacatcgctgcaagcaccatcacacctcgcccccagcagcgacgaggaggagagcttaaccaccccaccacccagtcccgctaccaccacctctaccctcgatgatgaggaggaggtcgacgcagcccaggagatgcaggcgcaggataatgtgaaaacggaagagattgaggcagatgtcgagcaggacccgggctatgtgacgccggcggagcaccaggaggagctgaaacgctttctagacagagaggatgacgaccgcccagagcatcaagcagatggcgtttaccaggaggctgggatcagggatcatgtcgccgactacctcaccggccttggtggggaggacgtgctcctcaaacatctagcaaggcagtcgatcatagttaaagacgcattgctcgatctcactgaagtgcccatcagtgtggaagagcttagccgcgcctacgagctgaacctcttttcgcctcaggtaccccccaagcggcagccaaacggcacctgcgaggccaaccctcgactcaacttctatccagcttttactatccccgaagtgttggccacctaccacatctttttcaagaaccaaaagattccagtctcctgccgcgccaaccgcacccgcgccgatgccctgctcaacttgggtccgggagctcgcttacctgatatagcttccttggaagaggttccaaagatctttgagggtctgggaagtgatgagacacgggccgcaaatgctctgcaacagggagagaatgacatggatgaacaccacagcgctctggtggaactggagggtgacaatgcccggattgcagtgctcaagcgcagtatcgtggtcacccattttgcctaccccgctgttaacctgccccccaaagttatgagcgctgtcatggaccatctgctcatcaaacgagcaagacctctttcagaaaaccagaacatgcaggatccagacgcctcggacgagggcaagccggtagtcagtgacgagcagctatctcgctggctgggtaccaactccccccgagatttggaagagaggcgcaagcttatgatggctgtagtgctagtaactgtggagctggagtgtctgcgccgctttttcaccgaccctgagaccctgcgcaagctagaggagaacctgcactacacctttagacatggcttcgtgcggcaggcatgcaagatctccaacgtggagcttaccaacctggtttcttacatgggcattttgcatgagaaccgactagggcagagcgtcctgcacaccacccttaaaggggaggcccgccgtgactacatccgagactgtgtctacctctacctctgccatacctggcaaactggtatgggtgtgtggcaacagtgtttggaagagcagaacctaaaagagctggacaagctcttgcagagatccctcaaagccctgtggacaggttttgatgagcgcaccgtcgcctcggacctggcagacatcatcttccccgagcgtctcagggttactctgcgaaacggcctgccagactttatgagccagagcatgcttaacaactttcgctctttcatcctggaacgctccggtatcctgcctgccacctgctgtgcgctgccctccgactttgtgcctctcacctaccgcgagtgcccaccgccgctatggagccactgctacctgttccgcctggccaactacctctcctaccactcggatgttatagaggatgtgagcggagacggcctgctggaatgccactgccgctgcaatctttgcacaccccaccgctcccttgcctgcaacccccagttgctgagcgagacccagattatcggcaccttcgagctgcagggtcccagaagtaaaggcgaggggtcttctccggggcagagtttgaaactgacaccggggctgtggacctccgcctacctgcgcaagtttcaccccgaggactaccatccctatgagatcaggttctatgaggaccaatcacatcctcccaaagtcgagctctcagcctgcgtcatcacccagggagcaattctggcccaattgcaagccatccaaaaatctcgccaagaatttctgctaaaaaagggaaacggggtctaccttgaccctcagaccggtgaggagctcaacacaaggttcccccaggatgtcccatcgccgaggaagcaagaagttgaaggtgcagctgtcgcccccagaggatatgaaggaagactgggacagtcaggcagaggaggagatggaagattgggacagccaggcagaggaggtggacagcctggaggaagacagtttggaggaggaagacgaggaggcagaggaggtggaagaagcaaccgccgccaaacagttgtcatcggcggcggagacaagcaagtccccagacagcagcacggctaccatctccgctccgggtcggggggcccagcggcggcccaacagtagatgggacgagaccgggcgattcccaaacccgaccaccgcttccaagaccggtaagaaggagcgacagggatacaagtcctggcgtggacataaaaacgctatcatctcctgcttgcatgaatgcgggggcaacatatccttcacccggcgatacctgctcttccaccacggtgtaaacttcccccgcaatatcttgcattactaccgtcacctccacagcccctactgcagtcagcaagtcccggcaaccccgacagaaaaatacagcagcgacaacggtgaccagaaaaccagcagttagaaaatccacaacaagtgcaccaggaggaggactgaggatcacagcgaacgagccagcgcagaccagagagctgaggaaccggatctttccaaccctctatgccattttccagcagagtcgggggcaagagcaggaactgaaagtaaaaaaccgatctctgcgctcgctcaccagaagttgtttgtatcacaagagcgaagaccaacttcagcgcactctcgaggacgccgaggctctcttcaacaagtactgcgcgctgactcttaaagagtagcccttgcccgcgctcattttgaaaacggcgggaatcacgtcacccttggcacctgtcctttgcccttgtcatgagtaaagagattcccacgccttacatgtggagctatcagccccaaatggggttggcagcaggcgcttcccaggactactccacccgcatgaattggcttagcgccgggccctcaatgatatcacgggttaatgatatacgagcttatcgaaaccagttactcctagaacagtcagctctcaccaccacaccccgtcaacaccttaatccccgaaattggcccgccaccctggtgtaccaggaaaatcccgctcccaccaccgtactacttcctcgagacgcccaggccgaagttcagatgactaacgcaggtgtacagctggcgggcggttccgccctatgtcgtcaccgacctcaacagagtataaaacgcctggtgattagaggccgaggtatccagctcaacgacgagtcggttagctcttcgcttggtctgcgaccagacggagtcttccaaatcgccggctgtgggagatcttccttcactcctcgtcaggctgtgctgactttggagagttcgtcctcgcagccccgctcgggcggcattggaactctccagtttgtggaggagtttactccctctgtctacttcaaccccttctccggctctcctggccagtacccggacgagttcataccaaacttcgacgcaatcagcgagtcagtggatggctatgattgatgtctaatggtggtgcggctgagctagctcgactgcgacacctagaccactgccgccgctttcgctgcttcgcccgggaactcaccgagttcatctacttcgaactctccgaggagcaccctcagggtccggcccacggagtgcggattaccatcgaagggggaatagactctcgcctgcatcgcatcttctcccagcggcccgtgctaattgaacgcgaccagggaaatacaaccatctccatctactgcatctgtaaccaccccggattgcatgaaagcctttgctgtcttgtttgtgctgagtttaataaaaactgagttaagaccctcctacggactaccgcttcttcaatcaggactttacaacaccaaccagatcttccagaagacccagacccttcctcctttcatccaggactctaactctaccttaccagcaccctccactactaaccttcccgaaacaaacaagcttgcatctcatctgcaacaccgcctttcacgaagccttctttctgccaatactaccactcccaaaaccggaggtgagctccgcggtcttcctactgacgacccctgggtggtagcgggttttgtaacgttaggagtagttgcgggtgggcttgtgctgatcctttgctacctatacacaccttgctgtgcatatttagtcatattgtgctgttggtttaagaaatgggggccatactagtcgtgcttgctttactttcgcttttgggtctgggctctgctaatctcaatcctctcgatcacgatccatgtttagacttcgacccagaaaactgcacacttacttttgcacccgacacaagccgtctctgtggagttcttattaagtgcggatgggactgcaggtccgttgaaattacacataataacaaaacatggaacaataccttatccaccacatgggagccaggagttccccagtggtatactgtctctgtccgaggtcctgacggttccatccgcattagtaacaacactttcattttttctgaaatgtgcgatctggccatgttcatgagcagacagtatgacctatggcctcccagcaaagagaacattgtggcattttccattgcttattgcttggtaacatgcatcatcactgctatcatttgtgtgtgcatacacttgcttatagttattcgccctagacaaagcaatgaggaaaaagagaaaatgccttaacctttttcctcataccttttctttacagcatggcttctgttacagctctaattattgccagcattgtcactgtcgctcacgggcaaacaattgtccatattaccttaggacataatcacactcttgtagggcccccaattacttcagaggttatttggaccaaacttggaagtgttgattattttgatataatttgcaacaaaactaaaccaatatttgtaatctgtaacagacaaaatctcacgttaattaatgttagcaaaatttataacggttactattatggttatgacagatccagtagtcaatataaaaattacttagttcgcataactcagcccaaattaacagtgccaactatgacaataattaaaatggctaataaagcattagaaaattttacatcaccaacaacacccaatgaaaaaaacattccaaattcaatgattgcaattattgcggcggtggcattgggaatggcactaataataatatgcatgctcctatatgcttgttactataaaaagtttcaacataaacaggatccactactaaattttaacatttaattttttatacagatgatttccactacaatttttatcattactagccttgcagctgtaacttatggccgttcacacctaactgtacctgttggctcaacatgtacactacaaggaccccaagaaggctatgtcacttggtggagaatatatgataatggagggttcgctagaccatgtgatcagcctggtacaaaattttcatgcaacggaagagacttgaccattattaacataacatcaaatgagcaaggcttctattatggaaccaactataaaaatagtttagattacaacattattgtagtgccagccaccacttctgctccccgcaaatccactttctctagcagcagtgccaaagcaagcacaattcctaaaacagcttctgctatgttaaagcttccaaaaatcgctttaagtaattccacagccgctcccaatacaattcctaaatcaacaattggcatcattactgccgtggtagtgggattaatgattatatttttgtgtataatgtactacgcctgctgctatagaaaacatgaacaaaaaggtgatgcattactaaattttgatatttaattttttatagaattatgatattgtttcaatcaaataccactacctcctatgcatacacaaacattcagcctaaatacgctatgcaactagaaatcacaatactaattgtaattggaattcttatactatctgttattctttattttatattctgccgtcaaatacccaatgttcatagaaattctaaaagacgtcccatctattctcctatgattagtcgtccccatatggctctgaatgaaatctaagatctttttttttttctcttacagtatggtgaacatcaatcatgatccctagaaatttcttcttcaccatactcatctgtgcttttaatgtctgtgctactttcacagcagtagccactgcaagcccagactgtataggaccatttgcttcctatgcactttttgccttcgttacttgcatctgcgtgtgtagcatagtctgcctggttattaattttttccaactggtagactggatctttgtgcgaattgcctacctacgtcaccatcccgaataccgcaatcaaaatgttgcggcacttcttaggcttatttaaaaccatgcaggctatgctaccagtcattttaattttgctactaccctgcattcccctagcttccaccgccactcgcgctacacctgaacaacttagaaaatgcaaatttcaacaaccatggtcatttcttgattgctaccatgaaaaatctgattttcccacatactggatagtgattgttggaataattaacatactttcatgtacctttttctcaatcacaatataccccacatttaattttgggtggaattctcccaatgcactgggttacccacaagaaccagatgaacatattccactacaacacatacaacaaccactagcactggtacagtatgaaaatgagccacaaccttcactgccccctgccattagttacttcaacctaaccggcggagatgactgacccaatcgccacatcatccaccgctgccaaggagctgctggacatggacggacgtgcctcagaacagcgactcatccaactacgcattcgtcagcagcaggaacgagcagtaaaagagctaagggatgccattgggattcaccagtgcaaaaaaggcatattctgcttagtaaaacaatccaaaatctcctacgagatcaccgctactgaccatcgtctctcatacgagctcggtccgcagcgacaaaaattcacctgcatggtgggaatcaaccccatagttatcacccagcagtctggagatactaagggttgtatccagtgttcctgtgattccaccgagtgcatctacacactgctgaagaccctctgcggccttcgagacctcctacccatgaactaatcattgcccctaccttacccaatcaaaatattaataaagacacttacttgaaatcagcaatacagtctttgtcaaaactttctaccagcagcacctcaccctcttcccaactctggtactctaaacgtcggagggtggcatactttctccacactttgaaagggatgtcaaattttatttcctcttctttgcccacaatcttcatttctttatccccagatggccaagcgagctcggctaagcacttccttcaacccggtgtacccttatgaagatgaaagcagctcacaacacccatttataaatcctggtttcatttcccctgacgggttcacacaaagtccaaacggggttttaagtcttaaatgtgttaatccacttaccactgcaagcggctccctccaacttaaagtgggaagtggtcttacagtagacactactgatggatccttagaagaaaacatcaaagttaacacccccctaacaaagtcaaaccattctataaatttaccaataggaaacggtttgcaaatagaacaaaacaaactttgcagtaaactcggaaatggtcttacatttgactcttccaattctattgcactgaaaaataacactttatggacaggtccaaaaccagaagccaactgcataattgaatacgggaaacaaaacccagatagcaaactaactttaatccttgtaaaaaatggaggaattgttaatggatatgtaacgctaatgggagcctcagactacgttaacaccttatttaaaaacaaaaatgtctccattaatgtagaactatactttgatgccactggtcatatattaccagactcatcttctcttaaaacagatctagaactaaaatacaagcaaaccgctgactttagtgcaagaggttttatgccaagtactacagcgtatccatttgtccttcctaatgcgggaacacataatgaaaattatatttttggtcaatgctactacaaagcaagcgatggtgccctttttccgttggaagttactgttatgcttaataaacgcctgccagatagtcgcacatcctatgttatgacttttttatggtccttgaatgctggtctagctccagaaactactcaggcaaccctcataacctccccatttaccttttcctatattagagaagatgactgacaacaaaaataaagttcaacattttttattgaaattccttttacagtattcgagtagttattttgcctcccccttcccatttaacagaatacaccaatctctccccacgcacagctttaaacatttggataccattagagatagacatagttttagattccacattccaaacagtttcagagcgagccaatctggggtcagtaatacataaaaatgcatcgggatagtcttttaaagcgctttcacagtccaactgttgcggatgcgactccggagtctgaatcacggtcatctggaagaagaacgatgggaatcataatccgaaaacggaatcgggcgattgtgtctcatcaaacccacaagcaaccgctgtctgcgtcgctccgtgcgactgctgtttatgggatcggggtccgcagtgtcctgaagcatgattttaatagcccttaacattaactttctggtgcgatgcgcgcagcaacgcattctgatttcacttagattactacagtaggtacagcacattatcacaatattgtttaataaaccataattaaaagcgctccagccaaaactcatatctgatataatcgcccctgcatgaccatcataccaaagtttaatataaattaaatgtcgttccctcaaaaacacactacccacatacatgatctcttttggcatgtgcatattaacaatttgtctgtaccatggacaacgttggttaatcatgcaacccaatataaccttccggaaccacactgccaacaccgctcccccagccatgcattgaagtgaaccctgctgattacaatgacaatgaagaacccaattctctcgaccatgaatcacttgagactgaaaaatatctatagtagcacaacaaagacataaatgcatgcatcttctcataatttttaactcctctggatttaaaaacatatcccaaggaatgggaaactcttgcagaacagtaaagctggcagaacaaggaagaccacgaacacaacttacactatgcatagtcatagtatcacaatctggcaacagcgggtggtcttcagtcatagaagctcgggtttcattttcctcacatcgtggtaattgggctctggtgtaagggtgatgtctggcgcatgatgtggagcgtgcgcgcaaccttgtcataatggagttgcttcctgacattctcgtattttgtatagcaaaacgctgccctggcacaacacactcttcttcgtcttctatcctgccgcttagtgtgttccgtctgataattcaagtacagccacactcttaagttggtcaaaagaatgctggcttcagttgtaatcaaaactccatcatatttaattgttctaaggaaatcatccacggtagcatatgcaaatcccaaccaagcaatgcaactggattgcgtttcaagcagcagaggagagggaagagacggaagaatcatgttaatttttattccaaacgatctcgcagtacttcaaattgtagatcgcgcagatggcatctatcgcccccactgtgttggtgaaaaagcacagctaaatcaaaagaaatgcgattttcaaggtgctcaacggtggcttccaacaaagcctccacgcgcacatccaaaaacaaaagaataccaaaagaaggagcattttctaactcctcaaacatcatattacattcctgcaccattcccagataattttcagctttccagccttgaattattcgtgtcagttcttgtggtaaatccaaaccacacattacaaacaggtcccggagggcgccctccaccaccattcttaaacacaccctcataatgacaaaatatcttgctcctgtgtcacctgtagcaaattaagaatggcatcatcaattgacatgcccttggctctaagttcttctctaagttctagttgtagatactctctcatattatcaccaaactgcttagccagaagccccccgggaacaatagcaggggacgctacagtgcagtacaagcgcagacctccccaattggctccagcaaaaacaagattagaataagcatactgggaaccaccagtaatatcatcaaagttgctggaaatataatcaggcagagtttcttgtaaaaattgaataaaagaaaaattttccaaagaaacattcaaaaccgttgggatgcaaatacaataggttaccgcgctgcgctccaacattgttagttttgaattagtctgcaaaataaaagaaacaagcgtcatatcatagtagcctgtcgaacaggtggaaaaatcagtctttccatcacaagacaagccacagggtctccagctcgaccctcgtaaaacctgtcattgtgattaaacaacagcaccgaaagttcctcgcggtggccagcatgaataattcttgatgaagcatacaatccagacatgttagcatcagttaaagagaaaaaacagccaacatagcctctgggtataattatgcttaattttaagtatagcaaagccacccctcgcggatacaaagtaaaaggcacaggagaataaaaaatataattatttctctgctgctgttcaggcaacgttgctcccggtccctctaaatagacatacaaagcctcatcagccatggcttaccaggcaaagtacagcgggcgcacaaagcacaagctctaaagaagctctaaaaacactctccaacctctccacaatatatacacaagccctaaactgacgtaatgggagtaaagtgaaaaaaaaataccgccaagcccaacacacaccccgaaactgcgtcagcaggaaaaagtacagtttcacttccgcattcccaacaagcgtaacttcctctttctcatggtacgtcacatccgattaacttgcaacgtcattttcccacggtcgcgccgccccttttagccgttaaccccgcagccaatcaccacacagcgcgcacttttttaaattacctcatttacatgttggcaccattccatctataaggtatattatatagatag

SEQ ID NO: 200 - DNA, 35514 bp, Unknown
  Description of Unknown: Human adenovirus 7 sequence
ctctctatttaatataccttatagatggaatggtgccaatatgtaaatgaggtaatttaaaaaagtgcgcgctgtgtggtgattggctgtggggttaacggctaaaatgggcggggcggccgtgggaaaatgacgtgacttatgtgggaggagctatgttgcaagttattgcggtaaatgtgacgtaaaacgaggtgtggtttgaacacggaagtagacagttttcccacgcttactgacaggatatgaggtagttttgggcggatgcaagtaaaaattctccattttcgcgcgaaaactgaatgaggaagtgaatttctgagtcatttcgcggttatgacagggtggagtatttgccgagggccgagtagactttgaccgtttacgtggaggtttcgattaccgtgtttttcacctaaatttccgcgtacggtgtcaaagtcctgtgtttttacgtaggtgtcagctgatcgctagggtatttaaacctgacgagttccgtcaagaggccactcttgagtgccagcgagaagagttttctccttcgcgccgcaagtcagttctgcgctttgaaaatgagacacctgcgtttcctgccacaggagattatcttcagtgagaccgggatcgaaatactggagtttgtggtaaataccctaatgggagacgacccggaaccgccagtgcagcctttcgatccacctacgctgcacgatctgtatgatttagaggtagacgggcctcaggatcccaatgaggaagctgtgaatgggttttttactgattctatgctgctagctgccgatgaaggattggacataaaccctcctcctgagacccttgttaccccaggggtggttgtggaaagcggcagaggtgggaaaaaattgcctgatctgggagcagctgaaatggacttgcgttgttatgaagagggttttcctccgagtgatgatgaagatggggaaactgagcagtccatccataccgcagtgaatgagggagtaaaagctgccagcgatgtttttaagttggactgtccggagctgcctggacatggctgtaagtcttgtgaatttcacaggaataacactggaatgaaagaactattgtgctcgctttgctatatgagaatgcactgccactttatttacagtaagtgtatttaagtgaaatttaaaggaatagtgtagctgtttaataactgttgaatggtagatttatgttttttacttgtgattttttgtaggtcctgtgtctgatgatgagtcaccttctcctgattcaactacctcacctcctgaaattcaggcgcccgcacctgcaaacgtatgcaagcccattcctgtaaagcctaagcctgggaaacgccctgctgtggataagcttgaggacttgttggagggtggggatggacctttggaccttagtacccggaaactgccaaggcaataagtgccctgcagctgtgtttatttaatgtgacgtcatgtaataaaattatgtcagctgctgagtgttttattacttcttgggtggggacttggatatataagtaggagcagatctgtgtggttagctcacagcaacctgctgccatccatggaggtttgggctatcttggaagacctcagacagactaggctactgctagaaaacgcctcggacggagtctctggcctttggagattctggttcggtggtgatctagctaggctagtgtttaggataaaacaggactacagcgtagaatttgaaaagttattggacgacagtccaggactttttgaagctcttaacttgggtcatcaggctcattttaaggagaaggttttatcagttttagatttttctactcctggtagaactgctgctgctgtagcttttcttacttttatattggataaatggatccgccaaactcacttcagcaagggatacgttttggatttcatagcagcagctttgtggagaacatggaaggctcgcaggatgaggacaatcttagattactggccagtgcagcctctaggagtagcagggatactgagacacccaccgaccatgccagcggttctgcaggaggagcagcaggaggacaatccgagagccggcctggaccctccggtggaggagtagctgacctgtttcctgaactgcgacgggtgcttactaggtctacgaccagtggacagaacagaggcattaagagggagaggaatcctagtgggaataattcaagaaccgagttggctttaagtttaatgagccgcaggcgtcctgaaactgtttggtggcatgaggttcagagcgaaggcagggatgaagtttcaatattgcaggagaaatattcactagaacaacttaagacctgttggttggaacctgaggatgattgggaggtggccattaggaattatgctaagatatctctgaggcctgataaacaatatagaattactaagaagattaatattagaaatgcatgctacatatcagggaatggggcagaggttataatagatacacaagataaagcagcttttagatgttgtatgatgggtatgtggccaggggttgtcggcatggaagcagtaacacttatgaatattaggtttagaggggatgggtataatggcattgtatttatggctaacactaagctgattctacatggttgtagcttttttgggtttaataatacgtgtgtagaagcttgggggcaagttagtgtgaggggttgtagtttttatgcatgctggattgcaacatcaggtagggtcaagagtcagttgtctgtgaagaaatgcatgtttgagagatgtaatcttggcatactgaatgaaggtgaagcaaggatccgccactgcgcagctacagaaactggctgcttcattctaataaagggaaatgccagtgtgaagcataatatgatctgtggacattcggatgagaggccttatcagatgctgacctgcgctggtggacattgcaatattcttgctactgtgcatatcgtttcacatgcacgcaagaaatggcctgtatttgaacataatgtgattaccaagtgcaccatgcacataggtggtcgcaggggaatgtttatgccttaccagtgtaacatgaatcatgtgaaggtaatgttggaaccagatgccttttccagagtgagcttaacaggaatctttgatatgaatattcaactatggaagatcctgagatatgatgacactaaaccgagggtgcgcgcatgcgaatgcggaggcaagcatgctagattccagccggtgtgcgtggatgtgactgaagacctgagacccgatcatttggtgcttgcctgcactggagcggagttcggttccagtggtgaagaaactgactaaagtgagtagtgggggcaagatgtggatggggactttcaggttggtaaggtggacagattgggtaaattttgttaatttctgtcttgcagctgccatgagtggaagcgcttcttttgaggggggagtatttagcccttatctgacgggcaggctcccaccatgggcaggagttcgtcagaatgtcatgggatccactgtggatgggagacccgtccagcccgccaattcctcaacgctgacctatgccactttgagttcgtcaccattggatgcagctgcagccgccgccgctactgctgccgccaacactatccttggaatgggctattacggaagcatcgttgccaattccagttcctctaataacccttcaaccctggctgaggacaagctacttgttctgttggctcagctcgaggccttaacccaacgcttaggcgaactgtctaagcaggtggcccagttgcgtgagcaaactgagtctgctgttgctacagcaaagtctaaataaagatctcaaatcaataaataaagaaatacttgttataaaaacaaatgaatgtttatttgatttttcgcgcgcggtatgccctggaccatcggtctcgatcattgagaactcggtggatcttttccagtaccctgtaaaggtgggattgaatgtttagatacataggcattagtccgtctcgggggtggagatagctccattgaagagcctcttgctccggggtagtgttataaatcacccagtcatagcaaggtcggagtgcatggtgttgcacaatatcttttaggagcagactaattgcaacggggaggcccttagtgtaggtgtttacaaatctattgagctgggacgggtacatccggggtgaaattatatgcattttggactggatcttgaggttggcaatgttgccgcctagatcccgtctcgggttcatattgtgcaggaccactaagacagtgtatccggtgcacttgggaaatttatcatgcagcttagagggaaaagcatgaaaaaatttggagacgcctttgtgaccccccagattctccatgcactcatccataatgatagcgatggggccgtgggcagcggcacgggcgaacacgttccgggggtctgaaacatcatagttatgctcctgagtcaggtcatcataagccattttaataaactttgggcggagggtgccagattgggggatgaaagttccctctggcccgggagcatagttcccctcacatatttgcatttcccaggctttcagttcagagggggggatcatgtccacctgcggggctataaaaaataccgtttctggagccggggtgattaactgggatgagagcaaattcctaagcagctgagacttgccgcacccagtgggaccgtaaatgaccccaattacgggttgcagatggtagtttagggagcgacagctgccgtcctcccggagtaggggggccacttcgttcatcatttcccttacatggatattttcccgcaccaagtccgttaggaggcgctctcccccaagggatagaagctcctggagcgaggagaagtttttcagcggcttcagcccgtcagccatgggcattttggaaagagtctgttgcaagagctcgagccggtcccagagctcggtgatgtgctctatggcatctcgatccagcagacctcctcgtttcgcgggttgggacggctcctggagtagggaatcagacgatgggcgtccagcgctgccagggtccgatccttccatggtcgcagcgtccgagtcagggttgtttccgtcacggtgaatgggtgcgcgcctggttgggcgcttgcgagggtgcgcttcagactcatcctgctggtcgagaaccgctgccgatcggcgccctgcatgtcggccaggtagcagtttaccatgagttcgtagttgagcgcctcggccgcgtggcctttggcacggagcttacctttggaagttttatggcaggcggggcagtagatacatttgagggcatacagcttgggcgcgaggaaaatggattcgggggagtatgcatccgcaccgcaggaggcgcagacggtttcgcactccacgagccaggtcagatccggctcatcggggtcaaaaacaagttttccgccatgttttttgatgcgtttcttacctttggtttccatgaggtcgtgtccccgctgggtgacaaagaggctgtccgtgtccccgtagaccgactttatgggcctgtcctcgagcggagtgcctcggtcctcttcgtagaggaacccagcccactctgatacaaaagcgcgtgtccaggccagcacaaaggaggccacgtgggaggggtagcggtcgttgtcaaccagggggtccaccttctctacggtatgtaaacacatgtccccctcctccacatccaagaatgtgattggcttgtaagtgtaggccacgtgaccaggggtccccgccgggggggtataaaagggggcgggcctctgttcgtcctcactgtcttccggatcgctgtccaggagcgccagctgttggggtaggtattccctctcgaaggcgggcatgacctctgcactcaggttgtcagtttctaggaacgaggaggatttgatattgacagtaccagcagagatgcctttcataagactctcgtccatctggtcagaaaacacaatcttcttgttgtccagcttggtagcaaatgatccatagagggcattggatagaagcttggcgatggagcgcatggtttggttcttttccttgtccgcgcgctccttggcggcgatgttaagctggacgtactcgcgcgccacacatttccattcagggaagatggttgtcagttcatccggaactattctgactcgccatcccctattgtgcagggttatcagatccacactggtggccacctcgcctcggaggggctcattggtccagcagagtcgacctccttttcttgaacagaaaggggggagggggtctagcatgagctcatcaggggggtccgcatctatggtaaatattcccggtagcaaatctttgtcaaaatagctgatggtggtgggatcatccaaggtcatctgccattctcgaactgccagcgcgcgctcataggggttaagaggggtgccccagggcatggggtgggtgagcgcggaggcatacatgccacagatatcgtatacatagaggggctcttcgaggatgccgatgtaagtgggataacagcgcccccctctgatgcttgctcgcacatagtcatagagttcatgtgagggggcgagaagacccgggcccagattggtgcggttgggtttttccgccctgtaaacgatctggcgaaagatggcatgggaatttgaagagatagtaggtctctggaatatgttaaaatgggcatgaggtaggcctacagagtcccttatgaagtgggcatatgactcttgcagcttggctaccagctcggcggtgacgagtacatccagggcacagtagtcgagagtttcctggatgatgtcataacgcggttggcttttcttttcccacagctcgcggttgagaaggtattcttcgcgatccttccagtactcttcgaggggaaacccgtctttttctgcacggtaagagcccaacatgtagaactgattgactgccttgtagggacagcatcccttctccactgggagagagtatgcttgggctgcattgcgcagcgaggtatgagtgagggcaaaagtgtccctgaccatgactttgaggaattgatacttgaagtccatgtcatcacaggccccctgttcccagagttggaagtccacccgcttcttgtaggcggggttgggcaaagcgaaagtaacatcattgaagaggatcttgccggccctgggcatgaaatttcgggtgattctgaaaggctgagggacctctgctcggttattgataacctgagcggccaagacgatctcatcaaagccattgatgttgtgccccactatgtacagttctaagaatcgaggggtgcccctgacatgaggcagcttcttgagttcttcaaaagtgagatctgtagggtcagtgagagcatagtgttcgagggcccattcgtgcacgtgagggttcgctttgaggaaggaggaccagaggtccactgcgagtgctgtttgtaactggtcccggtattgacgaaaatgctgcccgactgccattttttctggggtgacgcaatagaaggtttgggggtcctgccgccagcgatcccacttaagtttcatggcgaggtcataggcgatgttgacgagccgctggtctccagagagtttcatgaccagcatgaaggggattagctgcttgccaaaggaccccatccaggtgtaggtttccacatcgtaggtgaggaagagcctttctgtgcgaggatgagagccaatcgggaagaactggatctcctgccaccagttggaggaatggctgttgatgtgatggaagtagaactccctgcgacgcgccgagcattcatgcttgtgcttgtacagacggccgcagtactcgcagcgattcacgggatgcacctcatgaatgagttgtacctgacttcctttgacgagaaatttcagtggaaaattgaggcctggcgtttgtacctggcgctctactatgttgtctgcatcggcatgaccatcttctgtctcgatggtggtcatgctgacgagccctcgcgggaggcaagtccagacctcggcgcggcaggggcggagctcgaggacgagagcgcgcaggccggagctgtccagggtcctgagacgctgcggagtcaggttagtaggcagtgtcaggagattgacttgcatgatcttttcgagggcgtgagggaggttcagatggtacttgatctccacgggtccgttggtggagatgtcaatggcttgcagggttccgtgccccttgggcgctaccaccgtgcccttgtttttccttttgggcggcggtggctctgttgcttcttgcatgtttaggagcggtgtcgagggcgcgcaccgggcggcaggggcggctcgggacccggcggcatggctggcagtggtacgtcggcgccgcgcgcgggtaggttctggtactgcgccctgagaagactcgcatgtgcgacgacgcggcggttgacatcctggatctgacgcctctgggtgaaagctaccggccccgtgagcttgaacctgaaagagagttcaacagaatcaatctcggtatcgttgacggcggcttgcctaaggatttcttgcacgtcgccagagttatcctggtaggcgatctcggccatgaactgctggatctcttcctcttgaagatctccgcggcccgctctctcgacggtggccgctaggtcgttggagatgcgcccaatgagttgagagaatgcattcatgcccgcctcgttccagacgcggctgtagaccacagcccccacgggatctctcgcgcgcataaccacctgggcgaggttaagctctacgtggcgggtgaagaccgcatagttgcataggcgctggaaaaggtagttgagtgtggtggcgatgtgctcggtgacgaagaaatacatgatccatcgtctcagcggcatctcgctgacatcgcccagcgcttccaagcgctccatggcctcgtagaagtccacggcaaagttgaaaaactgggagttacgcgcggacacggtcaactcctcttccagaagacggatgagttcggcaatggtggtgcgcacctcgcgctcgaaatcccccgggatttcttcctcaatctcttcttcttccactaacatctcttcctcttcaggtggggctgcaggaggagggggaacgcggcgacgccggcggcgcacgggcagacggtcgatgaatctttcaatgacctctccgcggcggcggcgcatggtctcggtgacggcacgaccgttctccctgggtctcagagtgaagacgcctccgcgcatctccctgaagtggtgactgggaggctctccgttgggcagggacaccgcgctgattatgcattttatcaattgccccgtaggtactccgcgcaaggacctgatcgtctcaagatccacgggatctgaaaacctttcgacgaaagcgtctaaccagtcgcaatcgcaaggtaggctgagcactgtttcttgcgggcgggggcggctagacgctcggtcggggttctctctttcttttccttcctcctcttgggaggatgagacgatgctgctggtgatgaaattaaaataggcagttttgagacggcggatggtggcgaggagcaccaggtctttgggtccggcttgttggatgcgcaggcgatgggccattccccaagcattatcctgacatctggccagatctttatagtagtcttgcatgagtcgttccacgggcacttcttcttcgcccgctctgccatgcatgcgagtgatcccgaacccgcgcatgggctggacaagtgccaggtccgctacaaccctttcggcgaggatggcttgctgcacctgggtgagggtggcttggaagtcgtcaaagtccacaaagcggtggtaggccccggtgttgattgtgtaggagcagttggccatgactgaccagttgactgtctggtgcccagggcgcacgagctcggtgtacttgaggcgcgagtatgcgcgggtgtcaaagatgtaatcgttgcaggtgcgcaccaggtactggtagccgatgagaaagtgtggcggtggctggcggtacaggggccatcgctctgtagccggggctccgggggcaaggtcttccagcatgaggcggtggtaaccgtagatgtacctggacatccaggtgataccggaggcggtggtggatgcccgcgggaactcgcgtacgcggttccagatgttgcgcagcggcatgaagtagttcatggtaggcacggtttggcccgtgagacgtgcacagtcgttgatgctctagacatacgggcaaaaacgaaagcggtcagcggctcgtctccgtggcctggaggctaagcgaacgggttgggctgcgcgtgtaccccggttcgaatctcggatcaggctggagccgcagctaacgtggtactggcactcccgtctcgacccaggcctgcacaaaacctccaggatacggaggcgggtcgtttttttgctttttcctggatgggagccagtgctgcgtcaagctttagaacactcagttctcggggctgggagtggctcgcgcccgtagtctggagaattaatcgccagggttgcgttgcggtgtgccccggttcgagtcttagcgcgccggatcggccggtttccgcgacgtttctaagaccccgccagccgacttctccagtttacgggagcgagccctcttttttttttttgttttttgttgcccagatgcatcccgtgctgcgacagatgcgcccccagcaacagcccccttctcagcagcagctacaacaacagccacaaaaggctcttcctgctcctgtaactactgcggctgcagccgtcagcggcgcgggacagcccgcctatgatctggaattggaagagggcgagggactggcgcgcctgggcgcaccatcgcccgagcggcacccgcccagccgacttctccagtttacgggagcgagccctcttttttttttttgttttttgttgcccagatgcatcccgtgctgcgacagatgcgcccccagcaacagcccccttctcagcagcagctacaacaacagccacaaaaggctcttcctgctcctgtaactactgcggctgcagccgtcagcggcgcgggacagcccgcctatgatctggaattggaagagggcgagggactggcgcgcctgggcgcaccatcgcccgagcggcacccgcgggtgcaactgaaaaaggactctcgcgaggcgtacgtgccccagcagaacctgttcagggacaggagcggtgaggagccagaggagatgcgagcatctcgatttaacgcgggtcgcgagctgcgccacggtctggatcgaagacgggtgctgcaagacgaggattttgaggtcgatgaagtgacagggatcagcccagctagggcacatgtggccgcggccaacctagtctcagcctacgagcagaccgtgaaggaggagcgcaacttccaaaaatcttttaacaaccatgtgcgcaccctgatcgcccgcgaggaagtgaccctgggtctgatgcatctgtgggacctgatggaggctatcacccagaaccccactagcaaaccactgacagctcagctgtttctggtggttcaacatagcagggacaacgaggcattcagggaggcgttgttgaacatcaccgagcctgatgggagatggctgtatgatctgatcaacatcctgcaaagtattatagtgcaggaacgtagcctgggtttggctgagaaagtggcagctatcaactactcggtcttgagcctgggcaaatactacgctcgcaagatctacaagaccccctacgtacccatagataaggaggtaaagatagatgggttttacatgcgcatgactctgaaggtgctgactctgagcgacgatctgggggtgtatcgcaatgacaggatgcaccgcgcggtgagcgccagcaggaggcgcgagctgagcgacagagaacttatgcacagcttgcaaagagctctaacgggggccgggactgatggggagaactactttgacatgggagcggacttgcaatggcaacccagtcgcagggccatggaggctgcagggtgtgagcttccttacatagaagaggtggatgaagtcgaggacgaggagggcgagtacttggaagactgatggcgcgacccgtatttttgctagatggaacagcagcaggcaccggaccccgcaatgcgggcggcgctgcagagccagccgtccggcattaactcttcggacgattggacccaggccatgcaacgcataatggcgctgacgacccgcaaccccgaagcctttagacagcaaccccaggccaaccgcctttcggccatactggaggccgtagtgccctcccgctccaaccccacccacgagaaggtcctggctatcgtgaacgcgctggtggagaacaaggccatccgtcccgatgaggccgggctggtatacaatgctctcttggagcgcgtggcccgttacaacagcagcaacgtgcaaaccaacctggacaggatggtgaccgatgtgcgcgaggccgtgtctcagcgcgagcggttccagcgcggcgccaacttggggtcgttggtagcgctaaacgctttcctcagcacccagcccgccaacgtgccccgtggtcagcaagactatacaaactttttgagtgcattgagactcatggtagctgaggtgccccagagcgaggtgtaccagtccgggccagattacttcttccagaccagcagacagggcttgcagacagtgaacctgactcaggctttcaagaacctgaagggtctgtggggagtgcacgccccagtaggagatcgcgcgaccgtgtctagcttgctgactcccaactcccgcctgctgctgctgctggtatccccctttactgacagcggtagcatcgaccgcaactcgtacttgggctacctgcttaacctgtatcgcgaggccatagggcagagccaggtggacgagcagacctatcaagaaatcacccaagtgagccgcgccctgggtcaggaagacacgggcagtttggaagccaccctgaacttcttgctaaccaaccggtcgcagaagatccctcctcagtatgcgcttaccgctgaggaggagcggatcctcagatacgtgcaacagagcgttggactgtttctgatgcaggagggggcgacacctaccgccgcgctggacatgacagctcgaaacatggagcccagcatgtatgctagtaacaggcctttcattaacaaactgctggactacctgcacagggcggccgccatgaactctgattatttcaccaatgctatcctgaacccacactggctgcccccacctggtttctacactggcgagtacgacatgcccgaccccaatgacgggttcctgtgggacgatgtggacagcagcatattctccccgcctcccggttatacagtttggaagaaggaagggggcgatagaagacactcttccgtgtcgctgtccggaacggctggtgctgccgcgaccgtgcccgaagctgcaagtcctttccctagcttgcccttttcactaaacagcgttcgcagcagtgaactggggagaataacccgcccgcgcttgatgggcgaggatgagtacttgaatgactctttgctgaggccagagagggaaaagaacttccccaacaatggaatagagagtctggtggataagatgagtagatggaagacctatgcgcaggatcacagagacgagcccaggatattgggggctacaagcagaccgacccgtagacgccagcgccacgacagacagatgggtcttgtgtgggacgatgaggactctgccgatgatagcagcgtgttggacttgggtggaagaggagggggcaacccgttcgctcatctgcgtcccagattcgggcgcatgttgtaaaagtgaaagtaaaataaaaatgcaactcaccaaggccatggcgaccgagcgtgcgttcgttcttttttgttatctgtgtctagtacgatgaggagacgagccgtgctaggcggagcggtggtgtatccggagggtcctcctccttcttacgagagcgtgatgcagcaacaggcggcgatgatacagcccccactggaggttcccttcgtacccccgcggtacctggcgcctacggaagggagaaacagcattcgttactcggagctgtcgcccctgtacgataccaccaagttgtatctggttgacaacaagtcggcggacatcgcctccctgaactatcagaacgaccacagcaacttcctgaccacggtggtgcagaacaatgactttacccccacggaggctagcacccagaccatcaactttgacgaacggtcgcgatggggcggtcatctgaagaccatcatgcacaccaacatgcccaacgtgaacgagtacatgttcagcaacaagttcaaggcgagggtgatggtgtccagaaaagctcctgaaggtgttacagtaaatgacacctatgatcataaagaggatatcttgaagtatgagtggtttgagttcattttaccagaaggcaacttttcagccaccatgacgatcgacctgatgaacaatgccatcattgacaactacctggaaattggcagacagaatggagtgctggaaagtgacattggtgttaagtttgacactagaaatttcaggctcgggtgggaccccgaaactaagttgattatgccaggagtctacacttatgaggcattccatcctgacattgtattgctgcctggttgcggggtagactttactgaaagccgacttagcaacttgcttggcatcaggaagagacatccattccaggagggtttcaaaatcatgtatgaagatcttgaagggggtaatattcctgcccttttggatgtcactgcctatgaggaaagcaaaaaggataccactactgaaacaaccacactggctgttgcagaggaaactagtgaagatgataatataactagaggagatacctatataacagaaaaacacaaacgtgaagctgcagctgctgaagttaaaaaagagttaaagatccaacctctagaaaaagacagcaagagtagaagctacaatgtcttggaagacaaaatcaacacggcctaccgcagttggtacctgtcctacaattacggtaaccctaagaaaggaataaggtcttggacactgctcaccacttcagatgtcacctgtggggcagagcaggtttactggtcgctccctgacatgatgcaagacccagtcacgttccgctccacaagacaagtcaacaactacccagtggtgggtgcagagcttatgcccgtcttctcaaagagtttctacaatgagcaagccgtgtactctcagcagctccgacaggccacttcgctcacgcacgtcttcaaccgcttccctgagaaccagatcctcatccgcccgccggcgcccacaattaccaccgtcagtgaaaacgttcctgctctcacagatcacgggaccctgccgttacgcagcagtatccggggagtccagcgcgtgaccgttactgacgccagacgccgcacctgtccctacgtttacaaggccctgggcatagtcgcgccgcgcgttctttcaagccgcactttctaaaaaaaaaaaatgtccattctcatctcgcccagtaataataccggttggggactgtatgcgcccaccaagatgtatggaggcgcccgcaaacgctctacccagcaccctgtgcgcgttcgcggtcatttccgcgctccctggggcgcactcaagggtcgtacccgcactcggaccacggtcgatgatgtgatcgaccaggtggtcgccgatgctcgtaattatactcctactgcgcctacatctactgtggatgcagttattgacagtgtggtggcagacgcccgcgcctatgctcgccggaagagccgaaggaggcgcatcgccaggcgccacagggctactcccgccatgcgagctgcaaaagctattctgcggagggccaaacgtgtggggcgaagagccatgcttagagcggccagacgcgcggcttcaggtgccagcagcggcaggtcccgcaggcgcgcggccacggcggcagcagcggccattgccaacatggcccaaccgcgaagaggcaatgtgtactgggtgcgtgatgccactaccggccagcgcgtgcccgtgcgcactcgcccccctcgcacttagaagatactgagcagtctccgatgttgtgtcccagcggcaagtatgtccaagcgcaaatacaaggaagagatgctccaggtcatcgcgcctgaaatctacggtccaccggtgaaggatgaaaaaaagccccgcaaaatcaagcgggtcaaaaataacaaaaaggaagaagatgacgatgatgggctggtggagtttgtgcgcgagttcgccccaagacggcgcgtgcagtggcgcgggcgcaaagtgcgtcaagtgctcagacccgggaccactgtggtttttacacccggcgagcgttccagcactacttttaaacggtcctatgatgaggtgtacggggatgacaatattcttgagcaggcggcagaccgccttgacgagtttgcttatggcaagcgcactagatccagtcccaaagaggaggcggtgtccattcctttggatcatggaaatcccacccccagcctcaaaccagtcaccctgcagcaagtgctgcccgtgcctgcgcggagaggcgtaaagcgcgagggtgaggacctgtatcccaccatgcagctaatggtgcccaagcgccagaggctagaagacgtactggagaaaatgaaagtggatgccgatatccagcctgaggtcaaagtaagacctatcaaggaagtggcgccaggtttgggagtacaaaccttcgacatcaagattcccaccgagtccatggaagtgcagaccgaacctgcaaaacccacaaccacctcaattgaggtgcaaacggaaccctggatgcccgcgcccgttgccgcccccagcaccactcgaagatcacgacgaaagtacggcccagcaagtctgctaatgcccaactatgctctgcacccatccatcattcccactccgggttacagaggcactcgctactatcgaaaccggagcaacacctctcgccgccgcaaaccacctgcaagtcgcactcgccgtcgccgccgccgcaacactgccagcaaattgactcccgccgccctggtgcggagagtgtaccgcgatggtcgcgctgaacctctgacgctgccgcgcgcgcgctaccatccaagcatcaccacttaatgactgttgacgctgcctccttgcagatatggccctcacttgccgccttcgcgtccccattactggctaccgaggaagaaactcgcgccgtagaaggatgttggggcgagggatgcgccgccacagacgaaggcgcgctatcagcagacgattagggggtggctttttgccagctcttatacccatcatcgccgcagcgatcggggcgataccaggcatagcttccgtggcggttcaggcctcgcagcgccactaacattggaaaaacttataaataaaaaatagaatggactctgacgctcctggtcctgtgactatgtttttgtagagatggaagacatcaatttttcatccctggctccgcgacacggcacgaggccgtacatgggcacctggagcgacatcggcacgagccaactgaacgggggcgccttcaattggagcagtatctggagcgggcttaaaaattttggctcgaccgtaaaaacctatgggaacaaagcttggaacagcagcacagggcaggctctgagaaataagcttaaggaacaaaacttccaacagaaggtggtcgatgggatcgcctctggtattaacggcgtagtggatctggccaaccaggctgtacaaaaacagataaacagccgcctggacccgccgcccgcaacccctggtgaaatggaagtggaggaagaacttcctccgctggaaaagcggggcgacaagcgtccgcgacccgagctagagcacacgctggtgacgcgcgcagacgagcccccttcatacgaggaggcagtaaagctcggaatgcccactaccaggcccgtagctcacatggctaccggggtgatgaaaccttctgagttacatcgacccgccaccttggacttgcctcctccccctgcttctgcggcgcctgttcccaaacctgtcgctaccagaaagcccaccgccgtacagcccgttgccgtagccagaccgcgtcctgggggcacaccgcgcccgaaagcaaactggcaaagtactctgaacagcatcgtgggtctgggcgtgcagagtgtaaagcgccgtcgctgctattaattaaatatggagtagcgcttaacttgcttgtctgtgtgtatgtatcatcaccacgccgccgcagcagaggagaaaggaagaggtcgcgcgccgaggctgagttgctttcaagatggccaccccatcgatgatgccccaatgggcatacatgcacatcgccggacaggatgcttcggagtacctgagtccgggtctggtgcagttcgcccgtgcaacagacacctacttcagtatggggaacaagtttagaaaccccacagtggcgcccacccacgatgtgaccaccgaccgtagccagcgactgatgctgcgcttcgtgcccgttgaccgggaggacaatacatactcttacaaagtgcggtacaccctcgccgtgggcgacaacagagtgcttgacatggccagcacattctttgacattaggggggtgcttgatagaggtcctagcttcaagccatattccggcacagcttacaattcactggctcctaagggcgcgcctaacacatctcagtggatagttacaacgggagaagacaatgccaccacatacacatttggcattgcttccacgaagggagacaatattactaaggaaggtttagaaattgggaaagacattactgcagacaacaagcccatttatgccgataaaacatatcagccagagcctcaagttggagaagaatcatggactgatattgatggaacaaatgaaaaatttggaggtagagctcttaaaccagctactaaaatgaagccatgctacgggtcttttgcaagacctacaaacataaaagggggccaagctaaaaacagaaaagtaacaccaaccgaaggagatgttgaagctgaggagccagatattgatatggaatttttcgatggtagagaagctgctgacgctttttcgcctgaaattgtgctttacacggaaaatgtcaatttggaaactccagacagccatgtggtatacaagccaggaacttctgatggtaactctcatgcaaatttgggtcaacaagccatgcctaacagacccaattacattggcttcagggataactttgtaggtcttatgtactacaacagtactggaaatatgggagttttggccggccaagcatcacaactgaatgcagtggttgacttgcaggacagaaacactgaactgtcatatcagcttttgcttgattctctgggagacagaagcagatacttcagcatgtggaatcaggctgtggacagctatgatcccgatgttcgtattattgaaaatcatggcgtcgaggatgaactgcctaattactgttttcctctggatggcataggaccagggaacaaatatcaaggcattaaacctagagacactgcatgggaaaaagatactaaagtttctacagctaatgaaatagccataggcaacaatctggctatggaaattaatatccaagctaatctttggagaagttttctgtactccaatgtggctttgtaccttccagatgtttacaagtacacgccaactaacattactctgcccgctaacaccaacacctatgagtacatgaacgggcgagtggtttccccatctctggtcgattcatacatcaacattggcgccaggtggtctcttgacccaatggacaatgtgaatccatttaaccaccaccgcaatgctggcctacgctaccggtccatgcttctgggcaatggccgttatgtgcctttccacatacaagtgcctcaaaaattctttgctgtcaagaacctacttcttctacctggctcctacacctatgagtggaacttcagaaaggatgtgaacatggtcctgcaaagttcccttggaaatgacctcagaacagatggtgctaacataagtttcaccagcatcaacctctatgccaccttcttccccatggctcacaacaccgcttcaactcttgaagccatgctgcgcaacgataccaatgatcagtcattcaacgactacctctctgcagctaacatgctttaccccatccctgccaatgcaaccaacattccaatttccatcccatctcgcaactgggcagccttcaggggctggtccttcaccagactcaaaaccaaggagactccatctcttggatcagggttcgatccctacttcgtttattctggatctattccctacctggatggcactttttaccttaaccacactttcaagaaggtctccatcatgtttgactcctcagtcagctggcctggcaatgacaggctgttgtctccaaatgagtttgaaatcaagcgcactgtggatggggaaggatacaatgtggcccaatgcaacatgaccaaagactggttcctggttcagatgcttgccaactacaacattggctaccagggcttttacatccctgagggatacaaggatcgcatgtactcctttttcagaaacttccagcctatgagcaggcaggtggttgatgaggttaattacactgactacaaagccgtcaccttaccatatcaacacaacaactctggctttgtaggataccttgcgcctactatgagacaaggggaaccttacccagccaattatccatacccgctcatcggaactactgccgttaaaagtgttacccaaaaaaagttcctgtgcgacaggaccatgtggcgcataccgttctccagcaacttcatgtccatgggagcccttacggacctgggacagaacctgctctatgccaactcggcccatgcgctggacatgacttttgaggtggatcccatggatgagcccaccctgctttatcttcttttcgaagtcttcgacgtggtcagagtgcaccagccacaccgcggcgtcatcgaggccgtctacctgcgcacaccgttctcggccggcaacgccaccacataagaagcctcttgcttcttgcaagcagcagctgcagccatgtcatgcgggtccggaaacggctccagcgagcaagagctcaaagccatcgtccgagacctgggttgcggaccctatttcctgggaacctttgacaagcgtttcccggggttcatggcccccgacaagctcgcctgcgccatagtcaacactgccggacgcgagacggggggagagcactggctggcttttggttggaacccgcgctccaacacctgctacctttttgatccttttgggttctcggatgagcgactcaaacagatttaccagtttgagtacgaggggctcctgcgccgcagtgcccttgctaccaaagaccgctgcatcaccctggaaaagtccacccagagcgtgcagggcccacgctcagccgcctgtggacttttttgctgtatgttccttcatgcctttgtgcactggcccgaccgccccatgaacggaaaccccaccatgaagttgctgactggggtgcccaacagcatgctccaatctccccaagtgcagcccaccctgcgccgcaaccaggaggcgctatatcgcttcctaaacacccactcatcttactttcgttctcaccgcgcacgcatcgaaagggccaccgcgtttgaccgtatggatatgcaataagtcatgtaaaaccgtgttcaataaaaagcactttatttttacatgcactaaggctctcgttttttactcattcgttttcattattcactcagaaatcaaatgggttctggcgggagtcaaagtgacccgcgggcagggatacgttgcggaactgtaacctgttctgccacttgaactcggggatcaccaacttgggaactggaatctcgggaaaggtgtcttgccacaactttctggtcagctgcagggcgccaagtaggtcaggagcagagatcttgaaatcacagttgggaccggcattctggacacgggagttgcggtacactgggttgcaacactggaacaccatcaaggctgggtgtctcacgcttgccagcacggtcgggtcactgatggtagtcacatccaagtcttcagcattggccatcccaaagggggtcatcttacaggtctgcctgcccatcacgggagcgcagcctggcttgtggttgcaatcgcaatgaatggggatcagcatcatcctggcttggtcgggggttatccctgggtacacggccttcatgaaggcttcgtactgcttgaaagcttcctgagccttacttccctcggtatagaacatcccacaggacttgctggaaaattgattagtagcacagttggcatcatttacacagcagcgggcatcgttgttggccaactggaccacatttctgccccagcggttctgggtgatcttggctctgtctgggttctccttcatagcgcgctgtccgttctcgctcgccacatccatctcgataatgtggtccttctgaatcatgatagtgccatgcaggcatttcaccttgccttcataatcggtgcatccatgagcccacagagcgcacccggtgcactcccaactattgtgggcgatctcagaataagaatgtaccaatccctgcatgaatcttcccatcatcgctgtcagggtcttcatgctactaaatgtcagcgggatgccacggtgctcctcgttcacatactggtggcagatacgcttgtactgctcgtgctgctctggcatcagcttgaaagaggttctcaggtcattatccagcctgtacctctccattagcacagccatcacttccatgcccttctcccaggcagataccaggggcaagctcaaaggattcctaacagcaatagaagtagctcctttagctatagggtcattcttgtcgatcttctcaacacttctcttgccatccttctcaatgatgcgcaccggggggtagctgaagcccacggccaccaactgagcctgttctctttcttcttcgctgtcgtggccgatgtcttgcagagggacatgcttggtctttctgggcttcttcttgggagggatcgggggaggactgttgctccgttccggagacagggatgaccgcgaagtttcgcttaccagtaccacctggctctcgatagaagaatcggaccccacgcgacggtaggtgttcctcttcgggggcagaggtggaggcgactgagatgggctgcggtctggccttggaagcggatggctggcagagcccattccgcgttcgggggtgtgctcccgttggcggtcgcttgactgatttcctccgcggctggccattgtgttctcctaggcagagaaacaacagacatggaaactcagccatcactgccaacatcgctgcaagcgccatcacacctcgcccccagcagcgacgaggaggagagcttaaccaccccaccacccagtccagctaccaccacctctaccctcgatgatgaggaggaggaggtcgacgcagcccaggagatgcaggcgcaggataatgtgaaagcggaagagattgaggcagatgtcgagcaggacccgggctatgtgacaccggcggagcacgaggaggagctgaaacgttttatagacagagaggatgacgaccgcccagagcatcaagcagatggcgatcaccaggaggctggcatcggggatcaagttgccgactacctcaccgggcttgggggggaagacgtgctcctcaaacatctagcaaggcagtcgaacatagttaaagacgcactactcgacctcaccgaagtgcccatcagtgtggaagagcttagccgcgcctacgagctgaacctcttttcgcctcacataccccccaagcggcagccaaacggcacctgcgaggccaaccctcgactgaacttctatccagcttttactgtccccgaagtgctggccacctaccacatcttttttaagaaccaaaagattccagtctcctgccgcgccaaccgcacccgcgccgatgcccttctcaacttgggtccgggagctcgcttacctgatatagcttccttggaagaggttccaaaaatctttgagggtctgggaagtgatgagactcgggccgcaaatgctctgcaacagggagagaatggcatggatgaacatcacagcgctttagtggaactggagggtgacaatgcccggcttgcagtgctcaagcgcagtatcgtggtcacccattttgcctaccccgctgttaacctgccccccaaagttatgagcgctgttatggaccatctgctcatcaaacgagcaggtccactttcagaaaaccagaacatgcaggatccagacgcctcggacgagggcaagccggtagtcagtgacgagcagctatctcgctggctgggtaccaactccccccgagatttggaagagaggcgcaagcttatgatggctgtagtgctagtaactgtggagctggagtgtttgcgccgctttttcaccgaccccgagaccctgcgcaagctagaggagaacctgcactacacctttagacatggcttcgtgcggcaggcatgcaagatctccaacgtggagcttaccaacctggtttcttacatgggcattttgcatgagaaccggctagggcagagcgtcctgcacaccacccttaaaggggaggcccgccgtgactacatccgagactgtgtctacctctacctctgccatacctggcagactggcatgggtgtgtggcaacagtgtttggaagagcagaacctaaaagagctggacaagctcttgcagagatccctcaaagccctgtggacaggttttgatgagcgcaccgtcgcctcggacctggcagacatcatcttccccgagcgtctcagggttactctgcgaaacggcctgccagactttatgagccagagcatgcttaacaactttcgctctttcatcctggaacgctccggtatcctgcctgccacctgctgtgcgctgccctccgactttgtgcctctcacctaccgcgagtgcccaccgccgctatggagccactgctacctgttccgcctggccaactacctctcctaccactcggatgttatagaggatgtgagcggagacggtctgctggaatgccactgccgctgcaatctttgcacaccccaccgctcccttgcctgcaacccccagttgctgagcgagacccagatcatcggcaccttcgagttgcagggtcccagcagtgaaggcgaggggtcttctccggggcagagtctgaaactgacaccggggctgtggacctccgcctacctgcgcaagtttcatcccgaggattaccacccctatgagatcaggttctatgaggaccagtcacatcctcccaaagtcgagctctcagcctgcgtcatcacccagggagcaattctggcccaattgcaagccatccaaaaatcccgccaagaatttctactgaaaaagggaagcggggtctaccttgacccccagaccggtgaggagctcaacacaaggttcccccaggatgtcccatcgccgaggaagcaagaagctgaaggtgcagctgacgcccccagaggatatggaggaagactgggacagtcaggcagaggaggagatggaagattgggacagccaggcagaggaggtggacagcctggaggaagacagtttggaggaggaagacgaggaggcagaggaggtggaagaagcaaccgccgccaaacagttgtcatcggcggcggagacaagcaagtccccagacagcagcacggctaccatctccgctccgggtcggggggtccagcggcggcccaacagtagatgggacgagaccgggcgattcccaaacccgaccaccgcttccaagaccggtaagaaggagcgacagggatacaagtcctggcgtggacataaaaacgctatcatctcctgcttgcatgaatgcgggggcaacatatccttcacccggcgatacctgctcttccaccacggtgtgaacttcccccgcaatatcttgcattactaccgtcacctccacagcccctactgcagtcagcaagtcccggcaaccccgacagaaaaagacagcagcgacaacggtgaccagaaaaccagcagttagaaaatctacaacaagtgcagcaggaggaggactgaggatcacagcgaacgagccagcgcagaccagagagctgaggaaccggatctttccaaccctctatgccatcttccagcagagtcgggggcaagagcaggaactgaaagtaaaaaaccgatctctgcgctcgctcaccagaagttgtttgtatcacaagagcgaagaccaacttcagcgcactctcgaggacgccgaggctctcttcaacaagtactgcgcgctgactcttaaagagtagcccttgcccgcgcttattcgaaaacggcgggaatcacgtcacccttggcacctgtcctttgccctagtcatgagtaaagagattcccacgccttacatgtggagctatcagccccaaatggggttggcagcaggcgcctcccaggactactccacccgcatgaattggcttagcgccgggccctcaatgatatcacgggttaatgatatacgagcttatcgaaaccagttactcctagaacagtcagctctcaccaccacaccccgccaacaccttaatccccgaaattggcccgccgccctggtgtaccaggaaactcccgctcccaccaccgtactacttcctcgagacgcccaggccgaagttcagatgactaacgcaggtgtacagctggcgggcggttccgccctatgtcgtcaccgacctcaacagagtataaaacgcctggtgatcagaggccgaggtatccagctcaacgacgagtcggttagctcttcgcttggtctgcgaccagacggagtcttccagatcgccggctgtgggagatcttccttcacccctcgtcaggctgtactgactttggagagttcgtcctcgcagccccgctcgggcggcatcggaactctccagttcgtggaggagtttactccctctgtctacttcaaccccttctccggctctcctggccagtacccagacgagttcataccgaacttcgacgcaatcagcgagtcagtggatggctatgattgatgtctaatggtggcgcggctgagctagctcgactgcgacacctagaccactgccgccgctttcgctgcttcgcccgggaactcaccgagttcatctacttcgaactccccgaggagcaccctcagggtccggcccacggagtgcggattaccatcgaagggggaatagactctcgcctgcatcgaatcttctcccagcgacccgtgctgattgagcgcgaccagggaaatacaaccatctccatttactgcatctgtaaccaccccggattgcatgaaagcctttgctgtcttgtttgtgctgagtttaataaaaactgagttaagaccctcctacggactaccgcttcttcaatcaggactttacaacaccaaccagatcttccagaagacccagacccttcctcctctgatccaggactctaactctaccttaccagcaccatccactactaaccttcccgaaactaacaagcttggatctcatctgcaacaccgcctttcacgaagccttctttctgccaatactaccactcccaaaaccggaggtgagctccgcggtctccctactgacgacccctgggtggtagcgggttttgtaacgttaggagtagttgcgggtgggcttgtgctaatcctttgctacctatacataccttgctgtgcatatttagtcatattgcgctgttggtttaaaaaatgggggccatattagtcgtgcttgctttactttcgcttttgggtctgggctctgctaatctcaatcctcttgatcacgatccatgtctagacttcgacccagaaaactgcacacttacttttgcacccgacacaagccgtctctgtggagttcttattaagtgcggatgggactgcaggtccgttgaaattacacataataataaaacatggaacaataccttatccaccacatgggagccaggagttcccgagtggtatactgtctctgtccgaggtcctgacggttccatccgcattagtaacaacacttttattttttctgaaatgtgcgatctggccatgttcatgagcagacagtatgacctatggcctcccagcaaagagaacattgtggcattttccattgcttattgcttggtaacatgcatcatcactgctatcatttgtgtgtgcatacacttgcttatagttattcgccctagacaaagcaataaggaaaaagagaaaatgccttaacctttttactcataccttttctttacagcatggcttttgttacagctctaattattgccaacattgtcactgtcgctcacgggcaaacaattatccatattaccttaggacataatcacacccttgtagggcccccaattacttcagaggttatttggaccaaacttggaagtgttgattattttgatataatttgcaacaaaactaaaccaatatttgtaatctgtaacagacaaaatctcacgttaattaatgttagcaaaatttataacggttactattatggttatgacagatccagtagtcaatataaaaattacttagttcgcataactcagcccaaattaacagtgcccactatgacaataattaaaatggctaataaagcattagaaaattttacatcaccaacaacgcccaatgaaaaaaacattccaaattcaatgattgcaattattgcggcggtggcattgggaatggcactaataataatatgcatgttcctatatgcttgttgctataaaaagtttcaacataaacaggatccactactaaattttaacatttaattttttatacagatgttttccactacaatttttatcattactagccttgcagctgtaacttatggccgttcacacctaactctacctgttggctcaacatgtacactacaaggaccccaacaaggctatgtcacttggtggagaatatatgataatggagggttcgctagaccatgtgatcagcctggtacaaaattttcatgcaacggaagagacttgaccataattaacataacatcaaatgagcaaggcttctattatggaaccaactataaagatagtttagattacaacattattgtagtgccagccaccacttctgctccccgcaaaaccactttctctagcagcagtgccaaagcaagcacaattcctaaaacagcttctgctatgttaaagcttcaaaaaatcgctttaaataattccacagccgctcccaatacaattcctaaatcaacaattggcatcattactgccgtggtagtgggattaattattatatttttgtgcataatgtactatgcctgctgctatagaaaacatgaacaaaaaggtgatgcattactaaattttgacatttaattttttatagaattatgatattgtttcaatcaaataccactaacactatcaatgtgcagactactttaaatcatgacatggaaaaccacactacctcctatgcatacacaaacattcagcctaaatacgctatgcaatagaaattctaaaagacgtcccatctattctcctatgattagtcgtccccatatggctttgaatgaaatctaagatcttttttttttttctcttacagtatggtgaacaccaatcatgatccctagaaatttcttcttcaccatactcatctgtgctttcaatgtctgtgctactttcacagcagtagccactgcaagcccagactgtataggaccatttgcttcctatgcactttttgccttcgttacttgcatctgcgtgtgtagcatagtctgcctggttattaattttttccaactggtagactggatctttgtacgaattgcctacctacgtcaccatcccgaataccgcaatcaaaatgttgcggcacttcttaggcttatttaaaaccatgcaggctatgctaccagtcattttaattctgctactaccctgcattgccctagcttccaccgccactcgcgctacacctgaacaacttagaaaatgcaaatttcaacaaccatggtcatttcttgattgctaccatgaaaaatctgatttccccacatactggatagtgattgttggaataattaacatactttcatgtacctttttctcaatcacaatataccccacatttaattttgggtggaattctcccaatgcactgggttacccacaagaaccagatgaacatatcccactacaacacatacaacaaccactagcactggtagagtatgaaaatgagccacaaccttcactacctcctgccattagttacttcaacctaaccggcggagatgactgaaatactcaccacctccaattccgccgaggatctgcttgatatggacggccgcgtctcagaacagcgactcgcccaactacgcatccgccagcagcaggaacgcgtgaccaaagagctcagagatgtcatccaaattcaccaatgcaaaaaaggcatattttgcttggtaaaacaagccaagatatcctacgagatcaccgctactgaccatcgcctctcttacgaacttggcccccaacgacaaaaatttacatgcatggtgggaatcacccctatagttatcactcagcaaagtggagatactaaggggtgcattcactgctcttgcgattccatcgagtgcacctacaccctgctaaagaccctatgcggcctaagagacctgctacccatgaattaaaaattaataaaaaatcacttacttgaaatcagcaataaggtctctgttgaaattttctcccagcagcacctcacttccctcttcccaactctggtattctaaaccccgttcagcggcatactttctccatactttaaaggggatgtcaaattttaactcctgtcctgtacccacaatcttcatgtctttcttcccagatgaccaagagagtccggctcagtgattccttcaaccctgtctacccctatgaagatgaaagcacctcccaacacccctttataaacccagggtttatttccccaaatggctttacacaaagcccagacggagttcttactttaaaatgtttaaccccactaacaaccacaggcgggtctctacagttaaaagtgggagggggtcttacaatagatgacaccgacggttttttgaaagaaaacataagtgccaccacaccactcgttaagactggtcactctataggtttgtcgctaggacccggattaggaacaaatgaaaacaaactttgtgccaaattgggagaaggacttacattcaattccaacaacatttgcattaatgacaatattaacaccctatggacaggagttaaccccaccagagccaactgtcaaataatggcctccagtgaatctaatgattgcaaattaattctaacactagttaaaactggagccctcgtcactgcatttgtttatgttataggagtatctaacgattttaatatgctaactacacataaaaatataaatttcactgcagagctgttttttgattctactggtaatttattaactagcctttcatccctaaaaactccacttaatcataaatcagggcaaaacatggctactggtgcccttactaatgctaaaggtttcatgcccagcacaactgcctatcctttcaatgttaattccagagaaaaagaaaactacatttacggaacttgttactacacagctagtgatcacactgcttttcccattgacatatctgtcatgcttaaccaaagagcattaaataatgagacatcatattgtattcgtgtaacttggtcctggaatacaggagttgccccagaagtgcaaacctctgctactaccctagtcacctctccatttaccttttactacattagagaagacgactgacaaataaagtttaacttgtttatttaaaatcaattcataaaattcgagtagttattttgcctcccccttcccatttaacagaatacaccaatctctccccacgcacagctttaaacatttggataccattacagatagacatagttttagattccacattccaaacagtttcaaagcgagccaatctggggtcagtgatacataaaaatgcatcgggatagtcttttaaagcgctttcacagtccaactgctgcggatgcgactccggagtctggatcacggtcatctggaagaagaacgatgggaatcataatccgaaaacggaatcgggcgattgtgtctcatcaaacccacaagcagccgctgtctgcgtcgctccgtgcgactgctgtttataggatcgggatccacagtgtcctgaagcatgattttaatagcccttaacattaactttctggtgcggtgcgcgcagcaacgcattctgatttcacttagattactacagtaggtacagcacattatcacaatattgtttaataaaccataattaaaagcgctccagccaaaactcatatcagatataatcgcccctgcatgaccatcataccaaattttaatataaattaaatgtcgttccctcaaaaacacactacccacatacataatctcttttggcatgtgcatattaacaatctgtctgtaccatggacaacgttggttaatcatgcaacccaatataaccttccgaaaccacactgccaacaccgctcccccagccatgcattgaagtgaaccctgccgattacaatgacaatgaagaacccaattctctcgaccatgaatcacttgagaataaaaaatatctatagtagcacaacaaagacataaatgcatgcatcttctcataattcttaactcctcgggatttagaaacatatcccaaggaatgggaaactcttgcagaacagtaaagctggcagaacaaggaagaccacgaacacaacttacactatgcatagtcatagtatcacaatctggcaacagcgggtggtcttcagtcatagaagctcgggtttcattttcctcacatcgtggtaactgggctctggtgtaagggtgatgtctggcgcatgatgtcgagcgtgcgcgcaaccttgtcataatggagttgcttcctgacattctcgtattttgtatagcaaaacgcggccctggcacaacacactcttcttcgtcttctatcctgccgcttagtgtgttccgtctgataattcaagtacagccacactcttaagttggtcaaaagaatgctggcttcagttgtaatcaaaactccatcatatttaattgttctaaggaaatcatccacggtagcatatgcaaatcccaaccaagcaatgcaactggattgcgtttcaagcagcagaggagagggaagagacggaagaatcatgttaatttttattccaaacgatctcgcagtacttcaaattgtagatcgcgcagatggcatctatcgcccccactgtgttggtgaaaaagcacagctaaatcaaaagaaatgcgattttcaaggtgctcaacggtggcttccaacaaagcctccacgcgcacatccaaaaacaaaagaataccaaaagaaggagcattttctaactcctcaaacatcatattacattcctgcaccattcccagataattttcagctttccagccttgaattattcgtgtcagttcttgtggtaaatccaaaccacacattacaaacaggtcccggagggcgccctccaccaccattcttaaacacaccctcataatgtcaaaatatcttgctcctgtgtcacctgtagcaaattaagaatggcatcatcaattgacatgcccttggctctaagttcttctctaagttctagttgtaaatactctttcatattatcaccaaactgcttagccagaagccccccgggaacaatagcaggggacgctacagtgcagtacaagcgcagacctccccaattggctccagcaaaaacaagattagaataagcatactgggaaccaccagtaatatcatcaaagttgctggaaatataatcaggcagagtttcttgtaaaaattgaataaaagaaaaattttccaaagaaacattcaaaacctctgggatgcaaatgcaataggttaccgcgctgcgctccaacattattagttttgaattagtctgtaaaataaaagaaacaagcgtcatatcatagtagcctgtcgaacaggtggataaatcagtctttccattacaagacaagccacagggtctccagctcgaccctcgtaaaacctgtcatcgtgattaaacaacagcaccgaaagttcctcgcggtggccagcatgaataattcttgatgaagcatataatccagacatgttagcatcagttaaagaaaaaaaacagccaacatagcctctgggtataattatgcttaatcttaagtatagcaaagccacccctcgcggatacaaagtaaaaggcacaggagaataaaaaatataattatttctctgctgctgttcaggcaacgttgcccccggtccctctaaatacacatacaaagcctcatcagccatggcttaccagacaaagtatagcgggcgcacaaagcacaagctctaaagaagctctaaagacgctctccaacctctccacaatatatacacaagccctaaactgacgtaatgggagtaaagtgtaaaaaatcccgccaagcccaacacacaccccgaaactgcgtcagcagggaaaagtacagtttcacttccgcaaacccaacaagcgtagcttcctctttctcacggtacgtcacatccgattaacttgcaacgtcattttcccacggccgccccgcccattttagccgttaaccccacagccaatcaccacacagcgcgcacttttttaaattacctcatttacatattggcaccattccatctataaggtatattatatagagag

SEQ ID NO: 201 - DNA, 34794 bp, Human mastadenovirus B
catcatcaataatataccttatagatggaatggtgccaatatgtaaatgaggtgattttaaaaagtgtggatcgtgtggtgattggctgtggggttaacggctaaaaggggcggtgcgaccgtgggaaaatgacgttttgtgggggtggagtttttttgcaagttgtcgcgggaaatgtgacgcataaaaaggcttttttctcacggaactacttagttttcccacggtatttaacaggaaatgaggtagttttgaccggatgcaagtgaaaattgttgattttcgcgcgaaaactgaatgaggaagtgtttttctgaataatgtggtatttatggcagggtggagtatttgttcagggccaggtagactttgacccattacgtggaggtttcgattaccgtgttttttacctgaatttccgcgtaccgtgtcaaagtcttctgtttttacgtaggtgtcagctgatcgctagggtatttatacctcagggtttgtgtcaagaggccactcttgagtgccagcgagaagagttttctcctctgcgccggcagtttaataataaaaaaatgagagatttgcgatttctgcctcaggaaataatctctgctgagactggaaatgaaatattggagcttgtggtgcacgccctgatgggagacgatccggagccacctgtgcagctttttgagcctcctacgcttcaggaactgtatgatttagaggtagagggatcggaggattctaatgaggaagctgtaaatggcttttttaccgattctatgcttttagctgctaatgaagggttagaattagatccgcctttggacacttttgatactccaggggtaattgtggaaagcggtacaggtgtaagaaaattacctgatttgagttccgtggactgtgatttgcactgctatgaagacgggtttcctccgagtgatgaggaggaccatgaaaaggagcagtccatgcagactgcagcgggtgagggagtgaaggctgccaatgttggttttcagttggattgcccggagcttcctggacatggctgtaagtcttgtgaatttcacaggaaaaatactggagtaaaggaactgttatgttcgctttgttatatgagaacgcactgccactttatttacagtaagtgtgtttaagttaaaatttaaaggaatatgctgtttttcacatgtatattgagtgtgagttttgtgcttcttattataggtcctgtgtctgatgctgatgaatcaccatctcctgattctactacctcacctcctgagattcaagcacctgttcctgtggacgtgcgcaagcccattcctgtgaagcttaagcctgggaaacgtccagcagtggaaaaacttgaggacttgttacagggtggggacggacctttggacttgagtacacggaaacgtccaagacaataagtgttccatatccgtgtttacttaaggtgacgtcaatatttgtgtgacagtgcaatgtaataaaaatatgttaactgttcactggtttttattgctttttgggcggggactcaggtatataagtagaagcagacctgtgtggttagctcataggagctggctttcatccatggaggtttgggccattttggaagaccttaggaagactaggcaactgttagagaacgcttcggacggagtctccggtttttggagattctggttcgctagtgaattagctagggtagtttttaggataaaacaggactataaccaagaatttgaaaagttgttggtagattgcccaggactttttgaagctcttaatttgggccatcaggttcactttaaagaaaaagttttatcagttttagacttttcaaccccaggtagaactgctgctgctgtggcttttcttacttttatattagataaatggatcccgcagactcatttcagcaggggatacgttttggatttcatagccacagcattgtggagaacatggaaggttcgcaagatgaggacaatcttaggttactggccagtgcagcctttgggtgtagcgggaatcctgaggcatccaccggtcatgccagcggttctggaggaggaacagcaagaggacaacccgagagccggcctggaccctccagtggaggaggcggagtagctgacttgtctcctgaactgcaacgggtgcttactggatctacgtccactggacgggataggggcgttaagagggagagggcatctagtggtactgatgctagatctgagttggctttaagtttaatgagtcgcagacgtcctgaaaccatttggtggcatgaggttcagaaagagggaagggatgaagtttctgtattgcaggagaaatattcactggaacaggtgaaaacatgttggttggagcctgaggatgattgggaggtggccattaaaaattatgccaagatagctttgaggcctgataaacagtataagattactagacggattaatatccggaatgcttgttacatatctggaaatggggctgaggtggtaatagatactcaagacaaggcagttattagatgctgcatgatggatatgtggcctggggtagtcggtatggaagcagtaacttttgtaaatgttaagtttaggggagatggttataatggaatagtgtttatggccaataccaaacttatattgcatggttgtagcttttttggtttcaacaatacctgtgtagatgcctggggacaggttagtgtacggggatgtagtttctatgcgtgttggattgccacagctggcagaaccaagagtcaattgtctctgaagaaatgcatatttcaaagatgtaacctgggcattctgaatgaaggcgaagcaagggtccgccactgcgcttctacagatactggatgttttattttgattaagggaaatgccagcgtaaagcataacatgatttgcggtgcttccgatgagaggccttatcaaatgctcacttgtgctggtgggcattgtaatatgctggctactgtgcatattgtttcccatcaacgcaaaaaatggcctgtttttgatcacaatgtgatgacgaagtgtaccatgcatgcaggtgggcgtagaggaatgtttatgccttaccagtgtaacatgaatcatgtgaaagtgttgttggaaccagatgccttttccagaatgagcctaacaggaatttttgacatgaacatgcaaatctggaagatcctgaggtatgatgatacgagatcgagggtacgcgcatgcgaatgcggaggcaagcatgccaggttccagccggtgtgtgtagatgtgactgaagatctcagaccggatcatttggttattgcccgcactggagcagagttcggatccagtggagaagaaactgactaaggtgagtattgggaaaactttggggtgggattttcagatggacagattgagtaaaaatttgttttttctgtcttgcagctgtcatgagtggaaacgcttcttttaaggggggagtcttcagcccttatctgacagggcgtctcccatcctgggcaggagttcgtcagaatgttatgggatctactgtggatggaagacccgtccaacccgccaattcttcaacgctgacctatgctactttaagttcttcacctttggacgcagctgcagctgccgccgccgcttctgttgccgctaacactgtgcttggaatgggttactatggaagcatcatggctaattccacttcctctaataacccttctaccctgactcaggacaagttacttgtccttttggcccagctggaggctttgacccaacgtctgggtgaactttctcagcaggtggtcgagttgcgagtacaaactgagtctgctgtcggcacggcaaagtctaaataaaaaaatcccagaatcaatgaataaataaacaagcttgttgttgatttaaaatcaagtgtttttatttcatttttcgcgcacggtatgccctagaccaccgatctctatcattgagaactcggtggattttttccaggatcctatagaggtgggattgaatgtttagatacatgggcattaggccgtctttggggtggagatagctccattgaagggattcatgctccggggtagtgttgtaaatcacccagtcataacaaggtcgcagtgcatggtgttgcacaatatcttttagaagtaggctgattgccacagataagcccttggtgtaggtgtttacaaaccggttgagctgggatgggtgcattcggggtgaaattatgtgcattttggattggatttttaagttggcaatattgccgccaagatcccgtcttgggttcatgttatgaaggaccaccaagacggtgtatccggtacatttaggaaatttatcgtgcagcttggatggaaaagcgtggaaaaatttggagacacccttgtgtcctccaagattttccatgcactcatccatgataatagcaatggggccgtgggcagcggcgcgggcaaacacgttccgtgggtctgacacatcatagttatgttcctgagttaaatcatcataagccattttaatgaatttggggcggagagtaccagattggggtatgaatgttccttcgggccccggagcatagttcccctcacagatttgcatttcccaagctttcagttccgagggtggaatcatgtccacctggggggctatgaaaaacaccgtttctggggcgggggtgattaattgtgatgatagcaaatttctgagcaattgagatttgccacatccggtggggccataaatgattccgattacgggttgcaggtggtagtttagggaacggcaactgccgtcttctcgaagcaagggggccacctcgttcatcatttcccttacatgcatattttcccgcaccaaatccattaggaggcgctctcctcctagtgatagaagttcttgtagtgaggaaaagtttttcagcggtttcagaccgtcagccatgggcattttggagagagtttgctgcaaaagttctagtctgttccacagttcagtgatgtgttctatggcatctcgatccagcagacctcctcgtttcgcgggtttggacggctcctggaatagggtatgagacgatgggcgtccagcgctgccagggttcggtccttccagggtctcagtgttcgagtcagggttgtttccgtcacagtgaaggggtgtgcgcctgcttgggcgcttgccagggtgcgcttcagactcatcctgctggtcgaaaacttctgtcgcttggcgccctgtatgtcggccaagtagcagtttaccatgagttcgtagttgagcgcctcggctgcgtggcctttggcgcggagcttacctttggaagttttcttgcataccgggcagtataggcatttcagcgcatacaacttgggcgcaaggaaaacggattctggggagtatgcatctgcgccgcaggaggcgcaaacagtttcacattccaccagccaggttaaatccggttcattggggtcaaaaacaagttttccgccatattttttgatgcgtttcttacctttggtctccatgagttcgtgtcctcgttgagtgacaaacaggctgtccgtgtccccgtagactgattttacaggcctcttctccagtggagtgcctcggtcttcttcgtacaggaactctgaccactctgatacaaaggcgcgcgtccaggccagcacaaaggaggctatgtgggaggggtagcgatcgttgtcaaccagggggtccaccttttccaaagtatgcaaacacatgtcaccctcttcaacatccaggaatgtgattggcttgtaggtgtatttcacgtgacctggggtccccgctgggggggtataaaagggggcggttctttgctcttcctcactgtcttccggatcgctgtccaggaacgtcagctgttggggtaggtattccctctcgaaggcgggcatgacctctgcactcaggttgtcagtttctaagaacgaggaggatttgatattgacagtgccggttgagatgcctttcatgaggttttcgtccatttggtcagaaaacacaatttttttattgtcaagtttggtggcaaatgatccatacagggcgttggataaaagtttggcaatggatcgcatggtttggttcttttccttgtccgcgcgctctttggcggcgatgttgagttggacatactcgcgtgccaggcacttccattcggggaagatagttgttaattcatctggcacgattctcacttgccaccctcgattatgcaaggtaattaaatccacactggtggccacctcgcctcgaaggggttcattggtccaacagagcctacctcctttcctagaacagaaagggggaagtgggtctagcataagttcatcgggagggtctgcatccatggtaaagattcccggaagtaaatccttatcaaaatagctgatgggagtggggtcatctaaggccatttgccattctcgagctgccagtgcgcgctcatatgggttaaggggactgccccatggcatgggatgggtgagtgcagaggcatacatgccacagatgtcatagacgtagatgggatcctcaaagatgcctatgtaggttggatagcatcgcccccctctgatacttgctcgcacatagtcatatagttcatgtgatggcgctagcagccccggacccaagttggtgcgattgggtttttctgttctgtagacgatctggcgaaagatggcgtgagaattggaagagatggtgggtctttgaaaaatgttgaaatgggcatgaggtagacctacagagtctctgacaaagtgggcataagattcttgaagcttggttaccagttcggcggtgacaagtacgtctagggcgcagtagtcaagtgtttcttgaatgatgtcataacctggttggtttttcttttcccacagttcgcggttgagaaggtattcttcgcgatccttccagtactcttctagcggaaacccgtctttgtctgcacggtaagatcctagcatgtagaactgattaactgccttgtaagggcagcagcccttctctacgggtagagagtatgcttgagcagcttttcgtagcgaagcgtgagtaagggcaaaggtgtctctgaccatgactttgagaaattggtatttgaagtcgatgtcgtcacaggctccctgttcccagagttggaagtctacccgtttcttgtaggcggggttgggcaaagcgaaagtaacatcattgaagagaatcttaccggctctgggcataaaattgcgagtgatgcgaaaaggctgtggtacttccgctcgattgttgatcacctgggcagctaggacgatctcgtcgaaaccgttgatgttgtgtcctacgatgtataattctatgaaacgcggcgtgcctctgacgtgaggtagcttactgagctcatcaaaggttaggtctgtggggtcagataaggcgtagtgttcgagagcccattcgtgcaggtgaggatttgcatgtaggaatgatgaccaaagatctaccgccagtgctgtttgtaactggtcccgatactgacgaaaatgccggccaattgccattttttctggagtgacacagtagaaggttctggggtcttgttgccatcgatcccacttgagtttaatggctagatcgtgggccatgttgacgagacgctcttctcctgagagtttcatgaccagcatgaaaggaactagttgtttgccaaaggatcccatccaggtgtaagtttccacatcgtaggtcaggaagagtctttctgtgcgaggatgagagccgatcgggaagaactggatttcctgccaccagttggaggattggctgttgatgtgatggaagtagaagtttctgcggcgcgccgagcattcgtgtttgtgcttgtacagacggccgcagtagtcgcagcgttgcacgggttgtatctcgtgaatgagttgtacctggcttcccttgacgagaaatttcagtgggaagccgaggcctggcgattgtatctcgtgctcttctatattcgctgtatcggcctgttcatcttctgtttcgatggtggtcatgctgacgagcccccgcgggaggcaagtccagacctcggcgcgggaggggcggagctgaaggacgagagcgcgcaggctggagctgtccagagtcctgagacgctgcggactcaggttagtaggtagggacagaagattaacttgcatgatcttttccagggcgtgcgggaggttcagatggtacttgatttccacaggttcgtttgtagagacgtcaatggcttgcagggttccgtgtcctttgggcgccactaccgtacctttgttttttcttttgatcggtggtggctctcttgcttcttgcatgctcagaagcggtgacggggacgcgcgccgggcggcagcggttgttccggacccgagggcatggctggtagtggcacgtcggcgccgcgcacgggcaggttctggtactgcgctctgagaagacttgcgtgcgccaccacgcgtcgattgacgtcttgtatctgacgtctctgggtgaaagctaccggccccgtgagcttgaacctgaaagagagttcaacagaatcaatttcggtatcgttaacggcagcttgtctcagtatttcttgtacgtcaccagagttgtcctggtaggcgatctccgccatgaactgctcgatttcttcctcctgaagatctccgcgacccgctctttcgacggtggccgcgaggtcattggagatacggcccatgagttgggagaatgcattcatgcccgcctcgttccagacgcggctgtaaaccacggccccctcggagtctcttgcgcgcatcaccacctgagcgaggttaagctccacgtgtctggtgaagaccgcatagttgcataggcgctgaaaaaggtagttgagtgtggtggcaatgtgttcggcgacgaagaaatacatgatccatcgtctcagcggcatttcgctaacatcgcccagagcttccaagcgctccatggcctcgtagaagtccacggcaaaattaaaaaactgggagtttcgcgcggacacggtcaattcctcctcgagaagacggatgagttcggctatggtggcccgtacttcgcgttcgaaggctcccgggatctcttcttcctcttctatctcttcttccactaacatctcttcttcgtcttcaggcgggggcggagggggcacgcggcgacgtcgacggcgcacgggcaaacggtcgatgaatcgttcaatgacctctccgcggcggcggcgcatggtttcagtgacggcgcggccgttctcgcgcggtcgcagagtaaaaacaccgccgcgcatctccttaaagtggtgactgggaggttctccgtttgggagggagagggcgctgattatacattttattaattggcccgtagggactgcacgcagagatctgatcgtgtcaagatccacgggatctgaaaacctttcgacgaaagcgtctaaccagtcacagtcacaaggtaggctgagtacggcttcttgtgggcgggggtggttatgtgttcggtctgggtcttctgtttcttcttcatctcgggaaggtgagacgatgctgctggtgatgaaattaaagtaggcagttctaagacggcggatggtggcgaggagcaccaggtctttgggtccggcttgctggatacgcaggcgattggccattccccaagcattatcctgacatctagcaagatctttgtagtagtcttgcatgagccgttctacgggcacttcttcctcacccgttctgccatgcatacgtgtgagtccaaatccgcgcattggttgtaccagtgccaagtcagctacgactctttcggcgaggatggcttgctgtacttgggtaagggtggcttgaaagtcatcaaaatccacaaagcggtggtaagctcctgtattaatggtgtaagcacagttggccatgactgaccagttaactgtctggtgaccagggcgcacgagctcggtgtatttaaggcgcgaataggcgcgggtgtcaaagatgtaatcgttgcaggtgcgcaccagatactggtaccctataagaaaatgcggcggtggttggcggtagagaggccatcgttctgtagctggagcgccaggggcgaggtcttccaacataaggcggtgatagccgtagatgtacctggacatccaggtgattcctgcggcggtagtagaagcccgaggaaactcgcgtacgcggttccaaatgttgcgtagcggcatgaagtagttcattgtaggcacggtttgaccagtgaggcgcgcgcagtcattgatgctctatagacacggagaaaatgaaagcgttcagcgactcgactccgtagcctggaggaacgtgaacgggttgggtcgcggtgtaccccggttcgagacttgtactcgagccggccggagccgcggctaacgtggtattggcactcccgtctcgacccagcctacaaaaatccaggatacggaatcgagtcgttttgctggtttccgaatggcagggaagtgagtcctattttttttttttgccgctcagatgcatcccgtgctgcgacagatgcgcccccaacaacagcccccctcgcagcagcagcagcagcaatcacaaaaggctgtccctgcaactactgcaactgccgccgtgagcggtgcgggacagcccgcctatgatctggacttggaagagggcgaaggactggcacgtctaggtgcgccttcacccgagcggcatccgcgagttcaactgaaaaaagattctcgcgaggcgtatgtgccccaacagaacctatttagagacagaagcggcgaggagccggaggagatgcgagcttcccgctttaacgcgggtcgtgagctgcgtcacggtttggaccgaagacgagtgttgcgggacgaggatttcgaagttgatgaaatgacagggatcagtcctgccagggcacacgtggctgcagccaaccttgtatcggcttacgagcagacagtaaaggaagagcgtaacttccaaaagtcttttaataatcatgtgcgaaccctgattgcccgcgaagaagttacccttggtttgatgcatttgtgggatttgatggaagctatcattcagaaccctactagcaaacctctgaccgcccagctgtttctggtggtgcaacacagcagagacaatgaggctttcagagaggcgctgctgaacatcaccgaacccgaggggagatggttgtatgatcttatcaacattctacagagtatcatagtgcaggagcggagcctgggcctggccgagaaggtggctgccatcaattactcggttttgagcttgggaaaatattacgctcgcaaaatctacaagactccatacgttcccatagacaaggaggtgaagatagatgggttctacatgcgcatgacgctcaaggtcttgaccctgagcgatgatcttggggtgtatcgcaatgacagaatgcatcgcgcggttagcgccagcaggaggcgcgagttaagcgacagggaactgatgcacagtttgcaaagagctctgactggagctggaaccgagggtgagaattacttcgacatgggagctgacttgcagtggcagcctagtcgcagggctctgagcgccgcgacggcaggatgtgagcttccttacatagaagaggcggatgaaggcgaggaggaagagggcgagtacttggaagactgatggcacaacccgtgttttttgctagatggaacagcaagcaccggatcccgcaatgcgggcggcgctgcagagccagccgtccggcattaactcctcggacgattggacccaggccatgcaacgtatcatggcgttgacgactcgcaaccccgaagcctttagacagcaaccccaggccaaccgtctatcggccatcatggaagctgtagtgccttcccgctctaatcccactcatgagaaggtcctggccatcgtgaacgcgttggtggagaacaaagctattcgtccagatgaggccggactggtatacaacgctctcttagaacgcgtggctcgctacaacagtagcaatgtgcaaaccaatttggaccgtatgataacagatgtacgcgaagccgtgtctcagcgcgaaaggttccagcgtgatgccaacctgggttcgctggtggcgttaaatgctttcttgagtactcagcctgctaatgtgccgcgtggtcaacaggattatactaactttttaagcgctttgagactgatggtatcagaagtacctcagagcgaagtgtatcagtccggtcctgattacttctttcagactagcagacagggcttgcagacggtaaatctgagccaagcttttaaaaaccttaaaggtttgtggggagtgcatgccccggtaggagaaagagcaaccgtgtctagcttgttaactccgaactcccgcctattattactgttggtagctcctttcaccgacagcggtagcatcgaccgtaattcctatttgggttacctactaaacctgtatcgcgaagccatagggcaaagtcaggtggacgagcagacctatcaagaaattacccaagtcagtcgcgctttgggacaggaagacactggcagtttggaagccactctgaacttcttgcttaccaatcggtctcaaaagatccctcctcaatatgctcttactgcggaggaggagaggatccttagatatgtgcagcagagcgtgggattgtttctgatgcaagagggggcaactccgactgcagcactggacatgacagcgcgaaatatggagcccagcatgtatgccagtaaccgacctttcattaacaaactgctggactacttgcacagagctgccgctatgaactctgattatttcaccaatgccatcttaaacccgcactggctgcccccacctggtttctacacgggcgaatatgacatgcccgaccctaatgacggatttctgtgggacgacgtggacagcgatgttttttcacctctttctgatcatcgcacgtggaaaaaggaaggcggcgatagaatgcattcttctgcatcgctgtccggggtcatgggtgctaccgcggctgagcccgagtctgcaagtccttttcctagtctacccttttctctacacagtgtacgtagcagcgaagtgggtagaataagtcgcccgagtttaatgggcgaagaggagtatctaaacgattccttgctcagaccggcaagagaaaaaaatttcccaaacaatggaatagaaagtttggtggataaaatgagtagatggaagacttatgctcaggatcacagagacgagcctgggatcatggggattacaagtagagcgagccgtagacgccagcgccatgacagacagaggggtcttgtgtgggacgatgaggattcggccgatgatagcagcgtgctggacttgggtgggagaggaaggggcaacccgtttgctcatttgcgccctcgcttgggtggtatgttgtaaaaaaaaataaaaaaaaaactcaccaaggccatggcgacgagcgtacgttcgttcttctttattatctgtgtctagtataatgaggcgagtcgtgctaggcggagcggtggtgtatccggagggtcctcctccttcgtacgagagcgtgatgcagcagcagcaggcgacggcggtgatgcaatccccactggaggctccctttgtgcctccgcgatacctggcacctacggagggcagaaacagcattcgttattcggaactggcacctcagtacgataccaccaggttgtatctggtggacaacaagtcggcggacattgcttctctgaactatcagaatgaccacagcaacttcttgaccacggtggtgcaaaacaatgactttacccctacggaagccagcacccagaccattaactttgatgaacgatcgcggtggggcggtcagctaaagaccatcatgcatactaacatgccaaacgtgaacgagtatatgtttagtaacaagttcaaagcgcgtgtgatggtgtccagaaaacctcccgacggtgctgcagttggggatacttatgatcacaagcaggatattttgaaatatgagtggttcgagtttactttgccagaaggcaacttttcagttactatgactattgatttgatgaacaatgccatcatagataattacttgaaagtgggtagacagaatggagtgcttgaaagtgacattggtgttaagttcgacaccaggaacttcaagctgggatgggatcccgaaaccaagttgatcatgcctggagtgtatacgtatgaagccttccatcctgacattgtcttactgcctggctgcggagtggattttaccgagagtcgtttgagcaaccttcttggtatcagaaaaaaacagccatttcaagagggttttaagattttgtatgaagatttagaaggtggtaatattccggccctcttggatgtagatgcctatgagaacagtaagaaagaacaaaaagccaaaatagaagctgctacagctgctgcagaagctaaggcaaacatagttgccagcgactctacaagggttgctaacgctggagaggtcagaggagacaattttgcgccaacacctgttccgactgcagaatcattattggccgatgtgtctgaaggaacggacgtgaaactcactattcaacctgtagaaaaagatagtaagaatagaagctataatgtgttggaagacaaaatcaacacagcctatcgcagttggtatctttcgtacaattatggcgatcccgaaaaaggagtgcgttcctggacattgctcaccacctcagatgtcacctgcggagcagagcaggtctactggtcgcttccagacatgatgaaggatcctgtcactttccgctccactagacaagtcagtaactaccctgtggtgggtgcagagcttatgcccgtcttctcaaagagcttctacaacgaacaagctgtgtactcccagcagctccgccagtccacctcgcttacgcacgtcttcaaccgctttcctgagaaccagattttaatccgtccgccggcgcccaccattaccaccgtcagtgaaaacgttcctgctctcacagatcacgggaccctgccgttgcgcagcagtatccggggagtccaacgtgtgaccgttactgacgccagacgccgcacctgtccctacgtgtacaaggcactgggcatagtcgcaccgcgcgtcctttcaagccgcactttctaaaaaaaaaaaaaatgtccattcttatctcgcccagtaataacaccggttggggtctgcgcgctccaagcaagatgtacggaggcgcacgcaaacgttctacccaacatcctgtccgtgttcgcggacattttcgcgctccatggggcgccctcaagggccgcactcgcgttcgaaccaccgtcgatgatgtaatcgatcaggtggttgccgacgcccgtaattatactcctactgcgcctacatctactgtggatgcagttattgacagtgtagtggctgacgctcgcaactatgctcgacgtaagagccggcgaaggcgcattgccagacgccaccgagctaccactgccatgcgagccgcaagagctctgctacgaagagctagacgcgtggggcgaagagccatgcttagggcggccagacgtgcagcttcgggcgccagcgccggcaggtcccgcaggcaagcagccgctgtcgcagcggcgactattgccgacatggcccaatcgcgaagaggcaatgtatactgggtgcgtgacgctgccaccggtcaacgtgtacccgtgcgcacccgtccccctcgcacttagaagatactgagcagtctccgatgttgtgtcccagcggcgaggatgtccaagcgcaaatacaaggaagaaatgctgcaggttatcgcacctgaagtctacggccaaccgttgaaggatgaaaaaaaaccccgcaaaatcaagcgggttaaaaaggacaaaaaagaagaggaagatggcgatgatgggctggcggagtttgtgcgcgagtttgccccacggcgacgcgtgcaatggcgtgggcgcaaagttcgacatgtgttgagacctggaacttcggtggtctttacacccggcgagcgttcaagcgctacttttaagcgttcctatgatgaggtgtacggggatgatgatattcttgagcaggcggctgaccgattaggcgagtttgcttatggcaagcgtagtagaataacttccaaggatgagacagtgtcgatacccttggatcatggaaatcccacccctagtcttaaaccggtcactttgcagcaagtgttacccgtaactccgcgaacaggtgttaaacgcgaaggtgaagatttgtatcccactatgcaactgatggtacccaaacgccagaagttggaggacgttttggagaaagtaaaagtggatccagatattcaacctgaggttaaagtgagacccattaagcaggtagcgcctggtctgggggtacaaactgtagacattaagattcccactgaaagtatggaagtgcaaactgaacccgcaaagcctactgccacctccactgaagtgcaaacggatccatggatgcccatgcctattacaactgacgccgccggtcccactcgaagatcccgacgaaagtacggtccagcaagtctgttgatgcccaattatgttgtacacccatctattattcctactcctggttaccgaggcactcgctactatcgcagccgaaacagtacctcccgccgtcgccgcaagacacctgcaaatcgcagtcgtcgccgtagacgcacaagcaaaccgactcccggcgccctggtgcggcaagtgtaccgcaatggtagtgcggaacctttgacactgccgcgtgcgcgttaccatccgagtatcatcacttaatcaatgttgccgctgcctccttgcagatatggccctcacttgtcgccttcgcgttcccatcactggttaccgaggaagaaactcgcgccgtagaagagggatgttgggacgcggaatgcgacgctacaggcgacggcgtgctatccgcaagcaattgcggggtggttttttaccagccttaattccaattatcgctgctgcaattggcgcgataccaggcatagcttccgtggcggttcaggcctcgcaacgacattgacattggaaaaaaacgtataaataaaaaaaaaaaaatacaatggactctgacactcctggtcctgtgactatgttttcttagagatggaagacatcaatttttcatccttggctccgcgacacggcacgaagccgtacatgggcacctggagcgacatcggcacgagccaactgaacgggggcgccttcaattggagcagtatctggagcgggcttaaaaattttggctcaaccataaaaacatacgggaacaaagcttggaacagcagtacaggacaggcgcttagaaataaacttaaagaccagaacttccaacaaaaagtagtcgatgggatagcttccggcatcaatggagtggtagatttggctaaccaggctgtgcagaaaaagataaacagtcgtttggacccgccgccagcaaccccaggtgaaatgcaagtggaggaagaaattcctccgccagaaaaacgaggcgacaagcgtccgcgtcccgatttggaagagacgctggtgacgcgcgtagatgaaccgccttcttatgaggaagcaacgaagcttggaatgcccaccactagaccgatagccccaatggccaccggggtgatgaaaccttctcagttgcatcgacccgtcaccttggatttgccccctccccctgctgctactgctgtacccgcttctaagcctgtcgctgccccgaaaccagtcgccgtagccaggtcacgtcccgggggcgctcctcgtccaaatgcgcactggcaaaatactctgaacagcatcgtgggtctaggcgtgcaaagtgtaaaacgccgtcgctgcttttaattaaatatggagtagcgcttaacttgcctatctgtgtatatgtgtcattacacgccgtcacagcagcagaggaaaaaaggaagaggtcgtgcgtcgacgctgagttactttcaagatggccaccccatcgatgctgccccaatgggcatacatgcacatcgccggacaggatgcttcggagtacctgagtccgggtctggtgcagttcgcccgcgccacagacacctacttcaatctgggaaataagtttagaaatcccaccgtagcgccgacccacgatgtgaccaccgaccgtagccagcggctcatgttgcgcttcgtgcccgttgaccgggaggacaatacatactcttacaaagtgcggtacaccctggccgtgggcgacaacagagtgctggatatggccagcacgttctttgacattaggggtgtgttggacagaggtcccagtttcaaaccctattctggtacggcttacaactccctggctcctaaaggcgctccaaatacatctcagtggattgcagaaggtgtaaaaaatacaactggtgaggaacacgtaacagaagaggaaaccaatactactacttacacttttggcaatgctcctgtaaaagctgaagctgaaattacaaaagaaggactcccagtaggtttggaagtttcagatgaagaaagtaaaccgatttatgctgataaaacatatcagccagaacctcagctgggagatgaaacttggactgaccttgatggaaaaaccgaaaagtatggaggcagggctctcaaacccgatactaagatgaaaccatgctacgggtcctttgccaaacctactaatgtgaaaggcggtcaggcaaaacaaaaaacaacggagcagccaaatcagaaagtcgaatatgatatcgacatggagttttttgatgcggcatcgcagaaaacaaacttaagtcctaaaattgtcatgtatgcagaaaatgtaaatttggaaactccagacactcatgtagtgtacaaacctggaacagaagacacaagttccgaagctaatttgggacaacaatctatgcccaacagacccaactacattggcttcagagataactttattggacttatgtactataacagtactggtaacatgggggtgctggctggtcaagcgtctcagttaaatgcagtggttgacttgcaggacagaaacacagaactttcttaccaactcttgcttgactctctgggcgacagaaccagatactttagcatgtggaatcaggctgtggacagttatgatcctgatgtacgtgttattgaaaatcatggtgtggaagatgaacttcccaactactgttttccactggacggcataggtgttccaacaaccagttacaaatcaatagttccaaatggagacaatgcgcctaattggaaggaacctgaagtaaatggaacaagtgagatcggacagggtaatttgtttgccatggaaattaaccttcaagccaatctatggcgaagtttcctttattccaatgtggctctatatctcccagactcgtacaaatacaccccgtccaatgtcactcttccagaaaacaaaaacacctacgactacatgaacgggcgggtggtgccgccatctctagtagacacctatgtgaacattggtgccaggtggtctctggatgccatggacaatgtcaacccattcaaccaccaccgtaacgctggcttgcgttaccgatccatgcttctgggtaacggacgttatgtgcctttccacatacaagtgcctcaaaaattcttcgctgttaaaaacctgctgcttctcccaggctcctacacttatgagtggaactttaggaaggatgtgaacatggttctacagagttccctcggtaacgacctgcgggtagatggcgccagcatcagtttcacgagcatcaacctctatgctacttttttccccatggctcacaacaccgcttccacccttgaagccatgctgcggaatgacaccaatgatcagtcattcaacgactacctatctgcagctaacatgctctaccccattcctgccaatgcaaccaatattcccatttccattccttctcgcaactgggcggctttcagaggctggtcatttaccagactgaaaaccaaagaaactccctctttggggtctggatttgacccctactttgtctattctggttctattccctacctggatggtaccttctacctgaaccacacttttaagaaggtttccatcatgtttgactcttcagtgagctggcctggaaatgacaggttactatctcctaacgaatttgaaataaagcgcactgtggatggcgaaggctacaacgtagcccaatgcaacatgaccaaagactggttcttggtacagatgctcgccaactacaacatcggctatcagggcttctacattccagaaggatacaaagatcgcatgtattcatttttcagaaacttccagcccatgagcaggcaggtggttgatgaggtcaattacaaagacttcaaggccgtcgccataccctaccaacacaacaactctggctttgtgggttacatggctccgaccatgcgccaaggtcaaccctatcccgctaactatccctatccactcattggaacaactgccgtaaatagtgttacgcagaaaaagttcttgtgtgacagaaccatgtggcgcataccgttctcgagcaacttcatgtctatgggggcccttacagacttgggacagaatatgctctatgccaactcagctcatgctctggacatgacctttgaggtggatcccatggatgagcccaccctgctttatcttctcttcgaagttttcgacgtggtcagagtgcatcagccacaccgcggcatcatcgaggcagtctacctgcgtacaccgttctcggccggtaacgctaccacgtaagaagcttcttgcttcttgcaaatagcagctgcaaccatggcctgcggatcccaaaacggctccagcgagcaagagctcagagccattgtccaagacctgggttgcggaccctattttttgggaacctacgataagcgcttcccggggttcatggcccccgataagctcgcctgtgccattgtaaatacggccggacgtgagacggggggagagcactggttggctttcggttggaacccacgttctaacacctgctacctttttgatccttttggattctcggatgatcgtctcaaacagatttaccagtttgaatatgagggtctcctgcgccgcagcgctcttgctaccaaggaccgctgtattacgctggaaaaatctacccagaccgtgcagggtccccgttctgccgcctgcggacttttctgctgcatgttccttcacgcctttgtgcactggcctgaccgtcccatggacggaaaccccaccatgaaattgctaactggagtgccaaacaacatgcttcattctcctaaagtccagcccaccctgtgtgacaatcaaaaagcactctaccattttcttaatacccattcgccttattttcgctcccatcgtacacacatcgaaagggccactgcgttcgaccgtatggatgttcaataatgactcatgtaaacaacgtgttcaataaacatcactttatttttttacatgtatcaaggctctgcattacttatttatttacaagtcgaatgggttctgacgagaatcagaatgacccgcaggcagtgatacgttgcggaactgatacttgggttgccacttgaattcgggaatcaccaacttgggaaccggtatatcgggcaggatgtcactccacagctttctggtcagctgcaaagctccaagcaggtcaggagccgaaatcttgaaatcacaattaggaccagtgctttgagcgcgagagttgcggtacaccggattgcagcactgaaacaccatcagcgacggatgtctcacgcttgccagcacggtgggatctgcaatcatgcccacatccagatcttcagcattggcaatgctgaacggggtcatcttgcaggtctgcctacccatggcgggcacccaattaggcttgtggttgcaatcgcagtgcagggggatcagtatcatcttggcctgatcctgtctgattcctggatacacggctctcatgaaagcatcatattgcttgaaagcctgctgggctttactaccctcggtataaaacatcccgcaggacctgctcgaaaactggttagctgcacagccggcatcattcacacagcagcgggcgtcattgttagctatttgcaccacacttctgccccagcggttttgggtgattttggttcgctcgggattctcctttaaggctcgttgtccgttctcgctggccacatccatctcgataatctgctccttctgaatcataatattgccatgcaggcacttcagcttgccctcataatcattgcagccatgaggccacaacgcacagcctgtacattcccaattatggtgggcgatctgagaaaaagaatgtatcattccctgcagaaatcttcccatcatcgtgctcagtgtcttgtgactagtgaaagttaactggatgcctcggtgctcctcgtttacgtactggtgacagatgcgcttgtattgttcgtgttgctcaggcattagtttaaaagaggttctaagttcgttatccagcctgtacttctccatcagcagacacatcacttccatgcctttctcccaagcagacaccaggggcaagctaatcggattcttaacagtgcaggcagcagctcctttagccagagggtcatctttagcgatcttctcaatgcttcttttgccatccttctcaacgatgcgcacgggcgggtagctgaaacccactgctacaagttgcgcctcttctctttcttcttcgctgtcttgactgatgtcttgcatggggatatgtttggtcttccttggcttctttttggggggtatcggaggaggaggactgtcgctccgttccggagacagggaggattgtgacgtttcgctcaccattaccaactgactgtcggtagaagaacctgaccccacacggcgacaggtgtttctcttcgggggcagaggtggaggcgattgcgaagggctgcggtccgacctggaaggcggatgactggcagaaccccttccgcgttcgggggtgtgctccctgtggcggtcgcttaactgatttccttcgcggctggccattgtgttctcctaggcagagaaacaacagacatggaaactcagccattgctgtcaacatcgccacgagtgccatcacatctcgtcctcagcgacgaggaaaaggagcagagcttaagcattccaccgcccagtcctgccaccacctctaccctagaagataaggaggtcgacgcatctcatgacatgcagaataaaaaagcgaaagagtctgagacagacatcgagcaagacccgggctatgtgacaccggtggaacacgaggaagagttgaaacgctttctagagagagaggatgaaaactgcccaaaacaacgagcagataactatcaccaagatgctggaaatagggatcagaacaccgactacctcatagggcttgacggggaagacgcgctccttaaacatctagcaagacagtcgctcatagtcaaggatgcattattggacagaactgaagtgcccatcagtgtggaagagctcagccgcgcctacgagcttaacctcttttcacctcgtactccccccaaacgtcagccaaacggcacctgcgagccaaatcctcgcttaaacttttatccagcttttgctgtgccagaagtactggctacctatcacatcttttttaaaaatcaaaaaattccagtctcctgccgcgctaatcgcacccgcgccgatgccctactcaatctgggacctggttcacgcttacctgatatagcttccttggaagaggttccaaagatcttcgagggtctgggcaataatgagactcgggccgcaaatgctctgcaaaagggagaaaatggcatggatgagcatcacagcgttctggtggaattggaaggcgataatgccagactcgcagtactcaagcgaagcatcgaggtcacacacttcgcatatcccgctgtcaacctgccccctaaagtcatgacggcggtcatggaccagttactcattaagcgcgcaagtcccctttcagaagacatgcatgacccagatgcctgtgatgagggtaaaccagtggtcagtgatgagcagctaacccgatggctgggcaccgactctcccagggatttggaagagcgtcgcaagcttatgatggccgtggtgctggttaccgtagaactagagtgtctccgacgtttctttaccgattcagaaaccttgcgcaaactcgaagagaatctgcactacacttttagacacggctttgtgcggcaggcatgcaagatatctaacgtggaactcaccaacctggtttcctacatgggtattctgcatgagaatcgcctaggacaaagcgtgctgcacagcaccctgaagggggaagcccgccgtgattacatccgcgattgtgtctatctgtacctgtgccacacgtggcaaaccggcatgggtgtatggcagcaatgtttagaagaacagaacttgaaagagcttgacaagctcttacagaaatctcttaaggttctgtggacagggttcgacgagcgcaccgtcgcttccgacctggcagacctcatcttcccagagcgtctcagggttactttgcgaaacggattgcctgactttatgagccagagcatgcttaacaattttcgctctttcatcctggaacgctccggtatcctgcccgccacctgctgcgcactgccctccgactttgtgcctctcacctaccgcgagtgccccccgccgctatggagtcactgctacctgttccgtctggccaactatctctcctaccactcggatgtgatcgaggatgtgagcggagacggcttgctggagtgtcactgccgctgcaatctgtgcacgccccaccggtccctagcttgcaacccccagttgatgagcgaaacccagataataggcacctttgaattgcaaggccccagcagccaaggcgatgggtcttctcctgggcaaagtttaaaactgaccccgggactgtggacctccgcctacttgcgcaagtttgctccggaagattaccacccctatgaaatcaagttctatgaggaccaatcacagcctccaaaggccgaactttcggcctgcgtcatcacccagggggcaattctggcccaattgcaagccatccaaaaatcccgccaagaatttctactgaaaaagggtaagggggtctaccttgacccccagaccggcgaggaactcaacacaaggttccctcaggatgtcccaacgacgagaaaacaagaagttgaaggtgcagccgccgcccccagaagatatggaggaagattgggacagtcaggcagaggaggcggaggaggacagtctggaggacagtctggaggaagacagtttggaggaggaaaacgaggaggcagaggaggtggaagaagtaaccgccgacaaacagttatcctcggctgcggagacaagcaacagcgctaccatctccgctccgagtcgaggaacccggcggcgtcccagcagtagatgggacgagaccggacgcttcccgaacccaaccagcgcttccaagaccggtaagaaggatcggcagggatacaagtcctggcgggggcataagaatgccatcatctcctgcttgcatgagtgcgggggcaacatatccttcacgcggcgctacttgctattccaccatggggtgaactttccgcgcaatgttttgcattactaccgtcacctccacagcccctactatagccagcaaatcccggcagtctcgacagataaagacagcggcggcgacctccaacagaaaaccagcagcggcagttagaaaatacacaacaagtgcagcaacaggaggattaaagattacagccaacgagccagcgcaaacccgagagttaagaaatcggatctttccaaccctgtatgccatcttccagcagagtcggggtcaagagcaggaactgaaaataaaaaaccgatctctgcgttcgctcaccagaagttgtttgtatcacaagagcgaagatcaacttcagcgcactctcgaggacgccgaggctctcttcaacaagtactgcgcgctgactcttaaagagtaggcagcgaccgcgcttattcaaaaaaggcgggaattacatcatcctcgacatgagtaaagaaattcccacgccttacatgtggagttatcaaccccaaatgggattggcggcaggcgcctcccaggactactccacccgcatgaattggctcagcgccgggccttctatgatttctcgagttaatgatatacgcgcctaccgaaaccaaatacttttggaacagtcagctcttaccaccacgccccgccaacaccttaatcccagaaattggcccgccgccctagtgtaccaggaaagtcccgctcccaccactgtattacttcctcgagacgcccaggccgaagtccaaatgactaatgcaggtgcgcagttagctggcggctccaccctatgtcgtcacaggcctcggcataatataaaacgcctgatgatcagaggccgaggtatccagctcaacgacgagtcggtgagctctccgcttggtctacgaccagacggaatctttcagattgccggctgcgggagatcttccttcacccctcgtcaggctgttctgactttggaaagttcgtcttcgcaaccccgctcgggcggaatcgggaccgttcaatttgtggaggagtttactccctctgtctacttcaaccccttctccggatctcctgggcattacccggacgagttcataccgaacttcgacgcgattagcgagtcagtggacggctacgattgatgtctggtgacgcggctgagctatctcggctgcgacatctagaccactgccgccgctttcgctgctttgcccgggaactcattgagttcatctacttcgaactccccaaggatcaccctcaaggtccggcccacggagtgcggatttctatcgaaggcaaaatagactctcgcctgcaacgaattttctcccagcggcccgtgctgatcgagcgagaccagggaaacaccacggtttccatctactgcatttgtaatcaccccggattgcatgaaagcctttgctgtcttatgtgtactgagtttaataaaaactgaattaagactctcctacggactgccgcttcttcaacccggattttacaaccagaagaacgaaacttttcctgtcgtccaggactctgttaacttcacctttcctactcacaaactagaagctcaacgactacaccgcttttccagaagcattttccctactaatactactttcaaaaccggaggtgagctccaaggtcttcctacagaaaacccttgggtggaagcgggccttgtagtgctaggaattcttgcgggtgggcttgtgattattctttgctacctatacacaccttgcttcactttcttagtggtgttgtggtattggtttaaaaaatggggcccatactagtcttgcttgttttactttcgcttttggaaccgggttctgccaattacgatccatgtctagacttcgacccagaaaactgcacacttacttttgcacccgacacaagccgcatctgtggagttcttattaagtgcggatgggaatgcaggtccgttgaaattacacacaataacaaaacctggaacaataccttatccaccacatgggagccaggagttcccgagtggtacactgtctctgtccgaggtcctgacggttccatccgcattagtaacaacactttcattttttctgaaatgtgcgatctggccatgttcatgagcaaacagtattctctatggcctcctagcaaggacaacatcgtaacgttctccattgcttattgcttgtgcgcttgccttcttactgctttactgtgcgtatgcatacacctgcttgtaaccactcgcatcaaaaacgccaataacaaagaaaaaatgccttaacctctttctgtttacagacatggcttctcttacatctctcatatttgtcagcattgtcactgccgctcatggacaaacagtcgtctctatccctctaggacataattacactctcataggacccccaatcacttcagaggtcatctggaccaaactgggaagcgttgattactttgatataatctgcaacaaaacaaaaccaataatagtaacttgcaacatacaaaatcttacattgattaatgttagcaaagtttacagcggttactattatggttatgacagatacagtagtcaatatagaaattacttggttcgtgttacccagttgaaaaccacgaaaatgccaaatatggcaaagattcgatccgatgacaattctctagaaacttttacatctcccaccacacccgacgaaaaaaacatcccagattcaatgattgcaattgttgcagcggtggcagtggtgatggcactaataataatatgcatgcttttatatgcttgtcgctacaaaaagtttcatcctaaaaaacaagatctcctactaaggcttaacatttaatttctttttatacagccatggtttccactaccacattccttatgcttactagtctcgcaactctgacttctgctcgctcacacctcactgtaactataggctcaaactgcacactaaaaggacctcaaggtggtcatgtcttttggtggagaatatatgacaatggatggtttacaaaaccatgtgaccaacctggtagatttttctgcaacggcagagacctaaccattatcaacgtgacagcaaatgacaaaggcttctattatggaaccgactataaaagtagtttagattataacattattgtactgccatctaccactccagcaccccgcacaactactttctctagcagcagtgtcgctaacaatacaatttccaatccaacctttgccgcgcttttaaaacgcactgtgaataattctacaacttcacatacaacaatttccacttcaacaatcagcattatcgctgcagtgacaattggaatatctattcttgtttttaccataacctactacgcctgctgctatagaaaagacaaacataaaggtgatccattacttagatttgatatttaatttgttctttttttttttatttacagtatggtgaacaccaatcatggtacctagaaatttcttcttcaccatactcatttgtgcatttaatgtttgcgctactttcacagcagtagccacagcaaccccagactgtataggagcatttgcttcctatgcactttttgcttttgttacttgcatctgcgtatgtagcatagtctgcctggttattaattttttccaacttatagactggatccttgtgcgaattgcctacctgcgccaccatcccgaataccgcaaccaaaatatcgcggcacttcttagactcatctaaaaccatgcaggctatactaccaatatttttgcttctattgcttccctacgctgtctcaaccccagctgcctatagtactccaccagaacaccttagaaaatgcaaattccaacaaccgtggtcatttcttgcttgctatcgagaaaaatcagaaattcccccaaatttaataatgattgctggaataattaatataatctgttgcaccataatttcatttttgatataccccctatttgattttggctggaatgctcccaatgcacatgatcatccacaagacccagaggaacacattcccctacaaaacatgcaacatccaatagcgctaatagattacgaaagtgaaccacaacccccactactccctgctattagttacttcaacctaaccggcggagatgactgaaacactcaccacctccaattccgccgaggatctgctcgatatggacggccgcgtctcagaacagcgactcgcccaactacgcatccgccagcagcaggaacgcgcggccaaagagctcagagatgtcatccaaattcaccaatgcaaaaaaggcatattctgtttggtaaaacaagccaagatatcctacgagatcaccgctactgaccatcgcctctcttacgaacttggcccccaacgacaaaaatttacctgcatggtgggaatcaaccccatagttatcacccagcaaagtggagatactaagggttgcattcactgctcctgcgattccatcgagtgcacctacaccctgctgaagaccctatacggcctaagagacctgctaccaatgaattaaaaaatgattaataaaaaatcacttacttgaaatcagcaataaggtctctgttgaaattttctcccagcagcacctcacttccctcttcccaactctggtattctaaaccccgttcagcggcatactttctccatactttaaaggggatgtcaaattttagctcctctcctgtacccacaatcttcatgtctttcttcccagatgaccaagagagtccggctcagtgactccttcaaccctgtctacccctatgaagatgaaagcacctcccaacacccctttataaacccagggtttatttccccaaatggcttcacacaaagcccaaacggagttcttactttaaaatgtttaaccccactaacaaccacaggcggatctctacagctaaaagtgggagggggacttacagtggatgacaccaacggttttttgaaagaaaacataagtgccaccacaccactcgttaagactggtcactctataggtttaccactaggagccggattgggaacgaatgaaaataaactttgtatcaaattaggacaaggacttacattcaattcaaacaacatttgcattgatgacaatattaacaccttatggacaggagtcaaccccaccgaagccaactgtcaaatcatgaactccagtgaatctaatgattgcaaattaattctaacactagttaaaactggagcactagtcactgcatttgtttatgttataggagtatctaacaattttaatatgctaactacacacagaaatataaattttactgcagagctgtttttcgattctactggtaatttactaactagactctcatccctcaaaactccacttaatcataaatcaggacaaaacatggctactggtgccattactaatgctaaaggtttcatgcccagcacgactgcctatcctttcaatgataattctagagaaaaagaaaactacatttacggaacttgttactacacagctagtgatcgcactgcttttcccattgacatatctgtcatgcttaaccgaagagcaataaatgacgagacatcatattgtattcgtataacttggtcctggaacacaggagatgccccagaggtgcaaacctctgctacaaccctagtcacctccccatttaccttttactacatcagagaagacgactgacaaataaagtttaacttgtttatttgaaaatcaattcacaaaatccgagtagttattttgcctcccccttcccatttaacagaatacaccaatctctccccacgcacagctttaaacatttggataccattagatatagacatggttttagattccacattccaaacagtttcagagcgagccaatctggggtcagtgatagataaaaatccatcgggatagtcttttaaagcgctttcacagtccaactgctgcggatgcgactccggagtctggatcacggtcatctggaagaagaacgatgggaatcataatccgaaaacggtatcggacgattgtgtctcatcaaacccacaagcagccgctgtctgcgtcgctccgtgcgactgctgtttatgggatcagggtccacagtgtcctgaagcatgattttaatagcccttaacatcaactttctggtgcgatgcgcgcagcaacgcattctgatttcactcaaatctttgcagtaggtacaacacattattacaatattgtttaataaaccataattaaaagcgctccagccaaaactcatatctgatataatcgcccctgcatgaccatcataccaaagtttaatataaattaaatgacgttccctcaaaaacacactacccacatacatgatctcttttggcatgtgcatattaacaatctgtctgtaccatggacaacgttggttaatcatgcaacccaatataaccttccggaaccacactgccaacaccgctcccccagccatgcattgaagtgaaccctgctgattacaatgacaatgaagaacccaattctctcgaccgtgaatcacttgagaatgaaaaatatctatagtggcacaacatagacataaatgcatgcatcttctcataatttttaactcctcaggatttagaaacatatcccagggaataggaagctcttgcagaacagtaaagctggcagaacaaggaagaccacgaacacaacttacactatgcatagtcatagtatcacaatctggcaacagcgggtggtcttcagtcatagaagctcgggtttcattttcctcacaacgtggtaactgggctctggtgtaagggtgatgtctggcgcatgatgtcgagcgtgcgcgcaaccttgtcataatggagttgcttcctgacattctcgtattttgtatagcaaaacgcggccctggcagaacacactcttcttcgccttctatcctgccgcttagcgtgttccgtgtgatagttcaagtacaaccacactcttaagttggtcaaaagaatgctggcttcagttgtaatcaaaactccatcgcatctaatcgttctgaggaaatcatccacggtagcatatgcaaatcccaaccaagcaatgcaactggattgtgtttcaagcaggagaggagagggaagagacggaagaaccatgttaatttttattccaaacgatctcgcagtacttcaaattgtagatcgcgcagatggcatctctcgcccccactgtgttggtgaaaaagcacagctagatcaaaagaaatgcgattttcaaggtgctcaacggtggcttccagcaaagcctccacgcgcacatccaagaacaaaagaataccaaaagaaggagcattttctaactcctcaatcatcatattacattcctgcaccattcccagataattttcagctttccagccttgaattattcgtgtcagttcttgtggtaaatccaatccacacattacaaacaggtcccggagggcgccctccaccaccattcttaaacacaccctcataatgacaaaatatcttgctcctgtgtcacctgtagcgaattgagaatggcaacatcaattgacatgcccttggctctaagttcttctttaagttctagttgtaaaaactctctcatattatcaccaaactgcttagccagaagccccccgggaacaagagcaggggacgctacagtgcagtacaagcgcagacctccccaattggctccagcaaaaacaagattggaataagcatattgggaaccgccagtaatatcatcgaagttgctggaaatataataaggcagagtttcttgtaaaaattgaataaaagaaaaatttgccaaaaaaacattcaaaacctctgggatgcaaatgcaataggttaccgcgctgcgctccaacattgttagttttgaattagtctgcaaaaataaaaaaaaaaacaagcgtcatatcatagtagcctgacgaacagatggataaatcagtctttccatcacaagacaagccacagggtctccagctcgaccctcgtaaaacctgtcatcatgattaaacaacagcaccgaaagttcctcgcggtgaccagcatgaataattcttgatgaagcatacaatccagacatgttagcatcagttaacgagaaaaaacagccaacatagcctttgggtataattatgcttaatcgtaagtatagcaaagccacccctcgcggatacaaagtaaaaggcacaggagaataaaaaatataattatttctctgctgctgttcaggcaacgtcgcccccggtccctctaaatacacatacaaagcctcatcagccatggcttaccagacaaagtacagcgggcacacaaagcacaagctctaaagtgactctccaacctctccacaatatatatatacacaagccctaaactgacgtaatgggagtaaagtgtaaaaaatcccgccaaacccaacacacaccccgaaactgcgtcaccagggaaaagtacagtttcacttccgcaatcccaacaggcgtaacttcctctttctcacggtacgtgatatcccactaacttgcaacgtcattttcccacggtcgcaccgccccttttagccgttaaccccacagccaatcaccacacgatccacactttttaaaatcacctcatttacatattggcaccattccatctataaggtatattattgatgatg

SEQ ID NO: 202 - DNA, 34764 bp, Unknown
  Description of Unknown: Human adenovirus 14 sequence
catcatcaataatataccttatagatggaatggtgccaatatgtaaatgaggtgattttaaaaagtgtgggctgtgtggtaattggctgtggggttaacggctaaaaggggcggcgcggccgtgggaaaatgacgttttttgggggtggagtgtttttgcaagttgtcgcggtaaatgtgacgcaaacaaaggctttttttttacggaactacttagtgttcccacggtatttaacaggaaatgaggtagttttggccggatgcaagtaaaaattgttcattttcgcgcgaaaactgaatgaggaagtggttttctgaataatgcggtatttatggcagggtggagtatttgttcagggccaggtagactttgacccattacgtggaggtttcgattaccgcggaggtttcgattaccgtgttttttacctaaatttccgcgtaccgtgtgaaagtcttctgtttttacgtaggtgtcagctgatcgctacggtatttatacctcagggtttgtgtcaagaggccactcttgagtgccagcgagaagagttttctcctctgcgccggcagtttaatattaaaaaaaatgagacacttgcgatttatgcctcaggaaataatttctgctgagactggaaacgaaatactggagtttgtggtgcacgccctgatgggagacgatccggagccacctgtgcagctttttgagcctcctacgcttcaggaactgtatgatttagaggtagagggatcggaggattctaatgaggaagctgtgaatggcttttttaccgattctatgcttttagctgctaatgaaggattagaattagatccgcctttggacactttcgatactccaggggtgattgtggaaagcggtacagctgtaagaaaattacctgatttgggttccgtggactgtgatttgcactgctatgaagacgggtttcctttgagtgatgaggaggaccatgaaaaggagcagtctatgcagactgcagcgggtgagggagtgaaggctgccattggttttcagttggattgcccggagcttcctggacatggctgtaagtcttgtgaatttcacaggaaaaatactggagtaaaggaactgttatgttcgctttgttatatgagagcgcactgccactttatttacagtaagtgtgtttaagttaaaatttaaaggaatatgctgtttttcacatgtatattgagtgggaaatttgtgcttcttattataggtcctgtgtctgatgctgatgagtcaccatctcctgattctactacctcacctcctgagattcaagcacctgttcctgtggacgtgcacaagcccattcctgtaaagcttaagcctggaaaacgtccagcagtggaaaaactcgaggacttgttacagggtggggacggacctttggacttgagtacacggaaacggccaagacaataagtgttccatatccgtgtttacttaaggtgacgtcaatatttgtgtgagagtgcaatgtaataaaaatatgttaactgtgtactggtttttattgctttttgggcggggactcaggtatataagtagaagcagacctgtgtggttagctcatagaagctggctttgattcatggaggtttgggccattttggaagaccttagaaagactaggcaactgttagagaacgcttcggacggagtctccggtttttggagattctggttcgctagtgaattagctagggtagtttttaggataaaacaggactataaagaagaatttgaaaagttgttggtagattgtccaggactttttgaagctcttaatttgggccatcaagttcactttaaagaaaaagttttatcagttttagacttttcgaccccaggtagaactgccgctgctgtggcttttcttacttttatattagataaatggatcccgcagactcatttcagcaggggatacgttttggatttcgtagccacagcattgtggagaacatggaaggttcgcaagatgaggacaatcttaggttactggccagtgcagcctttgggtgtagcgggaatcctgaggcatccaccggtcatgccagcggttctggaggaggaacagcaagaggacaacccgagagccggcctggaccctccagtggaggaggcggagtagctgacttgtctcctgaactgcaacgggtgcttactggatctacgtccactggacgggataggggcgttaaaagggagagggcatctagtggtactgatgctagatctgagttggctttaagtttaatgagtcgcagacgtcctgaaaccatttggtggcatgaggtccagaaagagggaagggatgaagtttctgtattgcaggagaaatattcactggaacaggtgaaaacatgttggttggagcctgaggatgattgggaggtggccattaaaaattatgccaagatagctttgaggcctgataaacagtataagattactagacggattaatatccggaatgcttgttacatatctggaaatggggctgaggtggtaatagatactccagacaagacagttattagatgctgcatgatggatatgtggcctggagtagtcggtatggaagcagtaacttttgtaaatgttaagtttaggggagatggttataatggaatagtgtttatggccaataccaaacttatattgcatggttgtagcttttttggttttaacaatacctgtgtagatgcctggggacaggttagtgtacggggatgtagtttctatgcgtgttggattgccacagctggcagaaccaagagtcaattgtctctgaagaaatgcatattccaaagatgtaacctgggcattcttaatgaaggcgaagcaagggtccgccactgcgcttctacagatactggatgttttattttaattaagggcaatgccagcgtaaagcataacatgatttgcggtgcttccgatgagaggccttatcaaatgctcacttgtgccggagggcattgtaacatgctggctactgtgcatattgtttctcatcaacgcaaaaaatggcctgtttttgatcacaatgtgttgaccaagtgtaccatgcatgcaggtgggcgtagaggaatgtttatgccttaccagtgtaacatgaatcatgtaaaagtgttgttggaaccagatgccttttccagaatgagtctaacaggaatgtttgacatgaacatgcaaatctggaagatcctgaggtatgatgatacaagatcgagggtgcgcgcatgcgaatgcggaggcaagcatgccaggttccagccggtgtgtgtagatgtgactgaagatctgagaccggatcatttggttattgcccgcactggagcagagttcggatccagtggagaagaaactgactaaggtgagtattgggaaaactttggggtgggattttcagatggacagattgagtaaaaatttgtttttctgtcttgcagctgtcatgagtggaaacgcttcttttaatgggggagtcttcagcccttatctgacagggcgtctcccatcctgggcaggagttcgtcagaatgttatgggatctactgtggatggaagacccgtccaacccgccaattcttcaacgctgacctatgctactttaagttcttcacctttggacgcagctgcagccgccgctgccgcctctgttgccgctaacactgtgcttggaatgggttactatggaagcatcctggctaattccacttcctctaataacccttctaccctgactcaggacaagttacttgtccttttggcccagctggaggctttgacccaacgtctgggtgaactttctcagcaggtggccgagttgcgagtacaaactgagtctgctgtcggcacggcaaagtctaaataaaaaaaaaaaattccagaatcaatgaataaataaacgagcttgttgttgatttaaaatcaagtgttttttatttcatttttcgcgcacggtatgccctagaccaccgatctcgatcattgagaacacggtggattttttccaaaatcctataaaggtgggattgaatgtttagatacatgggcattaggccgtctttggggtggagatagctccattgaagggattcatgctccggggtagtgttgtaaattacccagtcataacaaggtcgctgtgcatggtgttgcacaatatcttttagaagtaggctgattgccacagataagcccttggtgtaggtgtttacaaaccggttgagctgggaggggtgcattcggggtgaaattatgtgcattttggattggatttttaagttggcaatattgccgccaagatctcgtcttgggttcatgttatgaagtaccaccaagacggtgtatccggtacatttaggaaatttatcgtgcagcttggatggaaaagcgtggaaaaatttggagacacccttgtgtcctccgagattttccatgcactcatccatgataatagcaatagggccgtgggcagcagcgcgggcaaacacgttccgtgggtctgacacatcatagttatgttcctgagttaaatcatcataggccattttaataaatttgggacggagagtacccgattggggtatgaatgttccttcgggccccggagcatagttcccctcacagatttgcatttcccaagctttcagttccgagggtggaatcatgtccacctggggggctataaagaacaccgtttctggggctggggtaattagttgggatgatagcaagtttctgagcaattgagatttgccacatccggtggggccataaatgattccgattacaggttgcagttggtagtttagggaacggcaactgccgtcttctcgaagcaagggggccacctcgttcatcatttcccttacatgcatattttcccgcaccaaatccattaggaggcgctctcctcctagtgatagaagttcttgtagtgaggaaaagtttttcagcggttttagaccgtcagccatgggcattttggagagagtctgttgcaaaagttctagtctgttccacagttcagtgatgtgttctatggcatctcgatccagcagacctcctcgtttcgcgggtttggacggctcctggagtagggtatgagacgatgggcgtccagcgctgccagggttcggtccttccagggtctcaaagttcgggtcagggttgtttccgtcacagtgaaggggtgtgcgcctgcttgggcgcttgccagggtgcgcttcagactcatcctgctggtcgaaaacttgtgccgcttggcgccctgtatgtcggccaagtagcagtttaccatgagttcgtagttgagcgcctcggctgcgtggcccttggcgcggagcttacctttggaagttttcttgcataccgggcagtataggcatttcagcgcatacagcttgggcgcaaggaaaatggattctggggagtatgcatccgcgccgcaggaggcgcaaacagtttcacattccaccagccaggttaaatccggttcattggggtcaaaaacaagttttccgccatattttttgatgcgtttcttacctttggtctccatgagttcgtgtcctcgttgagtgacaaacaggctgtccgtgtccccgtagactgattttacaggcctcttttccagtggagtgcctcggtcttcttcgtataggaactctgaccactctgatacaaaggcgcgcgtccaggccagcacaaaggaggctatgtgggaggggtagcgatcgttgtcaaccagggggtccaccttttccaaagtatgcaaacacatgtcactctcttcaacatccaggaatgtgattggcttgtaggtgtatttcacgtgacctggggtcccagctgggggggtataaaagggggcggttctctgctcttcctcactgtcttccggatcgctgtccaggaacgtcagctgttggggtaggtattccctctcgaaggcgggcatgacctctgcactcaggttgtcagtttctaagaacgaggaggatttgatattgacagtgccgcttgagatgcctttcatgaggttttcgtccatttggtcagaaaacacaatttttttattgtcaagtttggtggcaaatgatccatacagggcgttggataaaagtttggcaatggatcgcatggtttggttcttttccttgtccgcgcgctctttggcagcgatgttgagttggacatattcgcgtgccaggcacttccattcggggaagatagttgtcaattcatctggcacaattctcacttgccaccctcggttatgcaaggtaattaaatccacactggtggccacctcgcctcgaaggggttcgttggtccagcagagcctacctcctttcctagaacagaaaggtggaagtgggtctagcataagttcatcgggagggtctgcatccatggtaaagattccaggaagtaaatccttatcaaaatagctgatgggagtggggtcatctaaggccatttgccattctcgagctgccagtgcgcgctcatatgggttaaggggactgccccagggcatgggatgggtgagtgcagaggcatacatgccacagatgtcatagacgtagatgggatcctcaaagatgcctatgtaggttggatagcatcgcccccctctgatacttgctcgcacatagtcatatagttcatgtgacggcgctagcagccccggacccaagttggtgcgattgggtttttctgttctgtagacaatctggcgaaagatggcgtgagaattggaagagatggtgggtctttgaaaaatgttgaagtgggcatgaggtagacctacagagtctctgataaagtgggcataagattcttcaagcttggttaccagttgggcggtgacaagtacgtccagggcgcagtagtcaagtgtttcttgaatgatgtcataacctggttggtttttcttttcccacagttcgcggttgagaaggtattcttcgcgatccttccagtactcttctagcggaaacccgtctttgtctgcacggtaagatcctagcatgtagaactgattaactgccttgtaagggcagcagcccttctctacgggtagagagtatgcttgagcagcttttcgtagcgaagcgtgagtaagggcgaaggtgtctctaaccatgactttgacaaattggtatttaaagtccatgtcgtcacaggctccctgttcccagagttggaagtctacccgtttcttgtaggcggggttgggcaaagcgaaagtaacatcgttgaagagaatcttaccggctctgggcataaaattgcgagtgatgcgaaaaggctgtggtacttccgctcgattgttgatcacctgggcagctaggacgatctcgtcgaagccgttgatgttgtgtcctacaatgtataattctatgaaacgcggcgtgcctctgacgtgaggtagcttattgagctcatcaaaggttaggtctgtagggtcagataaggcgtagtgttcaagggcccattcgtgcagatgaggatttgcatgtaggaatgatgaccaaagatccaccgccagtgctgtttgtaactggtcccgatactgacgaaaatgctggccaattgccattttttctggagtgacacagtagaaggttccgggatcttgttgccatcgatcccacttaagtttaatggctagatcgtgggccatgttgacgagacgctcttctcctgagagtttcatgaccagcatgaaaggaactagttgtttgccaaaggaccccatccaggtgtaagtttccacatcgtaggtcaggaagagtctttctgtgcgaggatgagagccgattgggaaaaactggatttcctgccaccagttggaggattggctgttgatgtgatggaagtagaagtttctgcggcgcgccgagcattcgtgtttgtgcttgtacagacggccgcagtagtcgcagcgttgcacgggttgtatctcgtgaatgagctgtacctggcttcccttgacgagaaatttcagtgggaagccgaggcctggcgattgtatctcgtgctcttctatattcgctgtattggcctgttcatcttctgtttcgatggtggtcatgctgacgagcccccgcgggaggcaagtccagacctcggcgcgggaggggcggagctgaaggacgagagcgcgcaggctggagctgtccagagtcctgagacgctgcggactcaggttagtaggtagggacagaagattaacttgcatgatcttttccagggcgtgcgggaggtttagatggtacttgatttccacaggttcgtttgtagagacgtcaatggcttgcagggttccgtgtcctttgggtgccactaccgtacctttgttttttcttttgatcggtggtggctctcttgcttcttgcatgcttaaaagcggtgacggggacgcgcgccgggcggcagcggttgttccggacccgggggcatggctggtagtggcacgtcggcgccgcgcacgggcaggttctggtactgcgctctgagaagacttgcgtgcgccaccacgcgtcgattgacgtcttgtatctgacgtctttgggtgaaagctaccggccccgtgagcttgaacctgaaagagagttcaacagaatcaatttcggtatcgttaacggcagcttgtctcagtatttcttgtacgtcaccagagttgtcctggtaggcgatctccgccatgaactgctcgatttcttcctcctgaagatctccgcgacccgctctctcgacggtggccgcgaggtcattggagatacggcccatgagttgggagaatgcattcatgcccgcctcgttccagacgcggctgtaaaccacggccccctcggagtctcttgcgcgcatcaccacctgagcgaggttaagctccacgtgtctggtgaagaccgcatagttgcataggcgctgaaaaaggtagttgagtgtggtggcgatgtgttcggcgacaaagaaatacatgatccatcgtctcagcggcatttcgctgacatcgcccagagcttccaagcgctccatggcctcgtagaagtccacggcaaaattaaaaaactgggagtttcgcgcggacacggtcaattcctcctcgagaagacggatgagttcggctatggtggcccgtacttcgcgttcgaaggctcccggcatctcttcttcctcttctatctcttcttccactaacatctcttcttcgtcttcaggcgggggcggagggggcacgcggcgacgtcgacggcgcacgggcaaacggtcgatgaatcgttcaatgacctctccgcggcggcggcgcatggtttcagtgacggcgcggccgttctcgcgcggtcgcagagtaaaaacaccgccgcgcatctccttaaagtggtgactgggaggttctccgtttgggagggaaagggcgctgattatacattttattaattggcccgtagggactgcgcgcagagatctaatcgtgtcaagatccacgggatctgaaaacctttcaacgaaagcgtctaaccagtcacagtcacaaggtaggctgagtacggcttcttgtgggcgggggtggttatgtgttcggtctgggtcttctattccttcttcatctcgggaaggtgagacgatgctgctggtgatgaaattaaagtaggcagttctaagacggcggatggtggcgaggagcaccaggtctttgggtccggcttgctggatacgcaggcgattggccattccccaagcattatcctgacatctagccagatctttgtagtagtcttgcatgagccgttctacgggcacttcttcttcacccgttctgccatgcatacgtgtgagtccaaacccgcgcattggttggaccagtgccaagtcagctacaactctttcggcgaggatggcttgctgtacttgggtgagggtggcttgaaagtcatcaaaatccacgaagcggtggtaagccccggtattgatggtgtaagcacagttggccatgactgaccagttaactgtttggtgaccatggcgcacgagctcggtgtatttaaggcgcgaataggcgcgggtgtcaaaaatgtaatcgttgcaggtgcgcaccagatactggtaccctataagaaaatgcggtggtggttggcggtagagaggccattgttctgtagctggagcgccgggggcgaggtcttccaacataaggcggtgatagccgtagatgtacctggacatccaggtgattcctgcggcggtagtggaagcccgaggaaactcgcgtacgcggttccaaatgttgcgtagcggcatgaagtagttcattgtaggcacggtttgaccagtgaggcgcgcgcagtcattgatgctctatagacacgaagaaaatgaaagcgttcagcgactcgactctgtagcctggaggaacgtgaacgggttgggtcgcggtgtaccccggttcaagacttgtactcgagccggccggagccgcggctaacgtggtattggcactcccgtctcgacccagcctacaaaaatccaggatacggaatcgagtcgttttgctggttgctgaatggcagggaagtgagtcctatttttttttttgccgctcagatgcatcccgtgctgcgacagatgcgtccccaacaacagcccccctcgcagcagcagcaaccacaaaaggctgtccctgcaactactgcaactgccgccgtgagcggtgcgggacagcccgcctatgatctggacttggaagagggcgaaggactggcacgtctaggtgcgccctcgcccgagcggcatccgcgagttcaactgaaaaaagattctcgcgaggcgtatgtgccccaacagaacctatttagagacagaagcggcgaggagccggaggagatgcgagcttcccgctttaacgcgggtcgtgagctgcgtcacggtttggaccgaagacgagtgttgcgggacgaggatttcgaagttgatgaagtgacagggatcagtcctgccagggcacacgtggctgcagccaaccttgtatcggcttacgagcagacagtaaaggaagagcgtaacttccaaaagtcttttaataatcatgtgcgaaccctgattgcccgcgaagaagttactcttggtttgatgcatttgtgggatttgatggaagctatcattcagaaccctactagcaaacctctgaccgcacagctgtttctggtggtgcaacacagcagagacaacgaggctttcagagaggcactgctcaacatcactgaacccgaggggagatggttgtatgatcttatcaacattctacagagtatcatagtgcaggagcggagcctgggcctggccgaaaaggtggctgccatcaattactcggttttaagtttgggaaaatattacgctcgcaagatctacaagactccatacgttcccatagacaaggaggtgaagatagatgggttctacatgcgtatgacgctcaaggtcttgaccctgagcgatgatcttggggtgtaccgcaatgacagaatgcatcgcgccgttagcgccagtaggaggcgcgagttaagcgacagggaactgatgcacagtttgcaaagagctctgactggagctggaacagagggtgagaattactttgacatgggagctgacttgcagtggcagcctagtcgcagggctctgagcgccgcgacggcaggatgtgagcttccttacatagaagaggcggatgaaggcgaggaggaagagggcgagtacttggaagactgatggcacaacccgtgttttttgctagatggaacagcaagcaccggatcccgcaacgcgggcggcgctgcagagccagccgtccggcattaactcctcggacgattggacccaggccatgcaacgtatcatggcgttgacgactcgcaaccccgaagcctttagacagcaaccccaggccaaccgtctatcggccatcatggaagctgtagtgccttcccgctctaatcccactcatgagaaggtcctggccattgtaaacgcgttggtggagaacaaagctattcgtccagatgaggccggactggtatacaacgctcttttagaacgcgtggctcgctacaacagtagcaatgtgcaaaccaatttggaccgtatgataacagatgtacgcgaagccgtgtctcagcgtgaaaggttccagcgcgatgccaaccttggttcgctggtggcgttaaatgcttttttgagtactcagcctgctaatgtgccgcgtggtcaacaggattatactaactttttgagtgcgttgagactgatggtatctgaagtacctcagagcgaagtgtatcagtccggacctgactacttctttcagactagcagacagggtttgcagacggtaaatctgagccaagcttttaaaaaccttaaaggtttgtggggagtgcatgccccggtaggagaaagagcaaccgtgtctagcttgttaactccaaactcccgcctattactactgttggtagctcctttcaccgacagcggcagcatcgaccgtaattcctatttgggttacctactaaacctgtatcgcgaagccatagggcaaagccaggtggacgagcagacctatcaagaaattacccaagtcagtcgcgctttgggtcaggaagacactggcagtttggaagccactctgaacttcttgcttaccaatcggtctcagaagatccctcctcaatatgctcttactgcggaggaggagaggatccttagatatgtgcagcagagcgtgggattgtttctgatgcaagagggggcaactccgactgcggcattggacatgacagcgcgaaatatggagcccagcatgtatgccagtaaccggcctttcattaacaaactgctggactacttgcacagagctgccgctatgaactctgattattttaccaatgccatcctaaacccgcactggctgcccccacctggtttctacacgggcgaatatgacatgcccgaccctaatgacgggtttctgtgggacgacgtggacagtaatgttttttcacctctttttgatcatcgcacgtggaaaaaggaaggcggcgatagaatgcattcttctgcatcgctgtccggggtcatgggtgctaccgcggctgagcccgagtctgcaagtccttttcctagtctacccttttctctacacagtgtacgtagcagcgaagtgggtagaataagtcgcccgagtttaatgggcgaagaggaatacctaaacgattccttgctcagaccggcgagagaaaaaaatttcccaaacaatggaatagaaagtttggtggataagatgagtagatggaagacttatgctcaggatcacagagacgagcctgggatcatggggactacaagtagagcgagccgtagacgccagcgtcatgacagacagaggggtcttgtgtgggaagatgaggattcggccgatgatagcagcgtgttggacttgggtgggagaggaaggggcaacccgtttgctcatttgcgccctcgcttgggtggtatgttgtaaaaaaaaaataaaaaggaaaactcaccaaggccatggcgacgagcgtacgttcgttcttctttattatttgtgtctagtataatgaggcgagtcgtgctaggcggagcggtggtgtatccggagggtcctcctccttcgtacgagagcgtgatgcagcagcagcaggcgacggcggtgatgcaatccccactggaggctccctttgtacctccgcgatacctggcacctacggagggcagaaacagcattcgttactcggaactggcacctcagtacgataccaccaggttgtatctggtggacaacaagtcggcggacattgcttctctgaactatcagaatgaccacagcaacttcttgaccacggtggtgcagaacaatgactttacccctacggaagccagtacccagaccattaactttgatgaacgatcgcggtggggcggtcagctaaagaccatcatgcatactaacatgcccaacgtaaacgagtatatgtttagtaacaacttcaaagcgcgtgtgatggtgtccagaaaacctcccgaaggtgctgcagttggggatacatatgatcacaagcaggatattttggaatatgagtggttcgagtttactttgccagaaggcaacttttcagttactatgaccattgatttgatgaacaatgccatcatagataactacttgaaagtgggcagacagaatggagtgcttgaaagtgacattggtgttaagttcgacaccaggaacttcaagctgggatgggatcccgaaaccaagttgattatgcctggagtgtatacgtatgaagcctttcatcctgacattgtcttactgcctggctgtggagtggactttaccgaaagtcgtttgagcaaccttcttggtatcagaaaaaaacagccatttcaagagggttttaagattttgtatgaagatttagaaggaggtaatattccggccctcttggatgtagatgcctatgagaacagtaagaaagaacaaaaagccaaaatagaagctgctgcggaagctaaggcaaacatagttgccagcgactttacaagggttgctaacgctggagaggtcagaggagacaattttgcaccaacacctgttccgactgcagaatcattattggccgatgtaactggaggaacggacgtgaaactcactattcaacctgtagaaaaagatagtaagaatagaagctataatgtgttggaagataaaatcaacacagcctatcgcagttggtacctttcgtacaattatggcgatcccgaaaaaggagtgcgttcctggacattgctcaccacctcagatgtcacctgcggagcagagcaggtctactggtcgcttccagacatgatgcaggatcctgtcactttccgctccactagacaagtcagcaactaccctgtggtgggtgcagagcttatgcccgtcttctcaaagagcttctacaacgaacaagctgtgtactcccagcagctccgccagtccacctcgcttacgcacgtcttcaaccgctttcctgagaaccagattttaatccgtccgccggcgcccaccattaccaccgtcagtgaaaacgttcctgctctcacagatcacgggaccctgccgttgcgcagcagtatccggggagtccaacgtgtgaccgttactgacgccagacgccgcacctgtccctacgtgtacaaggcactgggcatagtcgcaccgcgcgtcctttcaagccgcactttctaaaaaaatgtccattcttatctcgcccagtaataacaccggttggggtctgcgcgctccaagcaagatgtacggaggcgcacgcaaacgttctacccaacatcccgtgcgtgttcgcggtcattttcgcgctccatggggtgccctcaagggccgcactcgcgttcgaaccaccgtcgatgatgtaatcgatgaggtggttgccgacgcccgtaattatactcctactgcgcctacatctactgtggatgcagttattgacagtgtagtggctgacgctcgcaactatgctcgacgtaagagccggcgaaggcgcattgccagacgccaccgagctaccactgccatgcgagccgcaagagctctgctacgaagagctagacgcgtgggacgaagagccatgcttagggcggccagacgtgcagcttcgggcgccagcgccggcaggtcccgcaggcaagcagccgctgtcgcagcggcgactattgccgacatggcccaaacgcgaagaggcaatgtatactgggtgcgtgacgctgccaccggtcaacgtgtacccgtgcgcacccgtccccctcgcacttagaagatactgagcagtctccgatgttgtgtcccagcggcgaggatgtccaagcgcaaatacaaggaagaaatgctgcaggttatcgcacctgaagtctacggccaaccgctgaaggatgaaaaaaaaccccgcaaaatcaagcgggctaaaaaggacaaaaaagaagaggaagatggcgatgatgggctggcggagtttgtgcgcgagtttgccccacggcgacgcgtgcaatggcgtggacgcaaagttcgacatttgttgagacctggaacttcggtggtctttacacccggcgagcgttcaagcgctacttttaagcgttcctatgatgaggtgtacggggatgatgatattcttgagcaggcggctgaccgattaggcgagtttgcttatggcaagcgtagtagaataaatcccaaggatgagacagtgtccatacccttggatcatggaaatcccacccctagtcttaaaccggtcactttgcagcaagtgttacccgtaactccgcgaacaggtgttaaacgcgaaggtgaagatttgtatcccactatgcaactaatggtacccaaacgccaaaagttggaggacgttttggagaaagtaaaagtggatccagatattcaacctgaggttaaagtgagacccattaagcaggtagcgcctggtctgggagtacaaactgtagacattaagattcccactgaaagtatggaagtgcaaactgaacccgcaaagcctactgccacctccactgaagtgcaaacggatccatggatgccgatgcctattacaactgacgccgccggtcccactcgaagatcccgacgaaagtacggtccagcaagtctgttgatgcccaactatgttgtacacccatctattattcctactcctggttaccgaggcactcgctactatcgcagccgaaacagtacctcccgccgtcgccgcaagacacctgcaaatcgcagtcgtcgccgtagacgcacaagcaaaccgactcccggcgccctggtgcggcaagtgtaccgcaatagtagtgcggaacctttgacactgccgcgtgcgcgttaccatccaagtatcatcacttaatcaatgttgccgctgcctccttgcagatatggccctcacttgtcgccttcgcgttcccatcactggttaccgaggaagaaattcgcgccgtagaagagggatgttggggcgcggaatgcgacgctacaggcgacggcgtgctatccgcaagcaattgcggggtggttttttgccagccttaattccaattatcgctgctgcaattggcgcgataccaggcatagcttccgtggcggttcaggcctcgcaacgacattgacattggaaaaaaaagtataaataaaaaaaaaaatacaatggactctgacactcctggtcctgtgactatgttttcttagagatggaaaacatcaatttttcatccttggctccgcgacacggcacgaagccgtacatgggcacctggagcgacatcggcacgagccaactgaacgggggcgccttcaattggagcagtatctggagcgggcttaaaaattttggctcaaccataaaaacatacgggaacaaagcttggaacagcagtacaggacaggcgcttagaaataaacttaaagaccagaactttcaacaaaaagtagtcgatgggatagcttccggcatcaatggagtggtagatttggctaatcaggctgtgcagaaaaagataaacagtcgtttggacccgccgccagcaaccccaggtgaaatacaagtggaggaagaaattcctccgccagaaaaacgaggcgacaagcgtccgcgtcccgatttggaagagacgctggtgacgcgcgtagatgaaccgccttcttatgaggaagcaacgaagcttggaatgcccaccactagaccgatagcccctatggctaccggggtaatgaaaccttctcagttgcatcgacccgtcactttggatttgccccctccccctgctgctactgctgtacccgcttctaagcctgtcgctgccccgaaaccagtcgccgtagccaggtcacgtcccgggggcgctcctcgtccaaatgcgcactggcaaaatactctgaacagcatcgtgggtctaggcgtgcaaagtgtaaaacgccgtcgctgcttttaattaaatatggagtagcgcttaacttgcctatctgtgtatatgtgtcattacacgccgtcacagcagcagaggaaaaaaggaagaggtcgtgcgtcgacgctgagttactttcaagatggccaccccatcgatgctgccccagtgggcatacatgcacatcgccggacaggatgcttcggagtacctgagtccgggtctggtgcagttcgcccgcgccacagacacctacttcaatctgggaaataagtttagaaatcccaccgtagcgccaacccacgatgtgaccaccgaccgtagccagcggctcatgttgcgcttcgtgcccgttgaccgggaggacaatacatactcttacaaagtgcggtacaccctggccgtgggcgacaacagagtgctggatatggccagcacgttctttgacattaggggcgtgttggacagaggtcccagtttcaaaccctattctggtacggcttacaactctctggctcctaaaggcgctccaaatgcatctcagtggttggataaaggggttgaaactactgaagaacggcaaaatgaagacggggaaaatgacgaaaaagctacatacacttttggcaatgccccagtaaaagccgatgctgacattacaaaagacggactaccaataggtttggaagtcccagctgaaggtgaccctaaacctatctacgctaataagctttaccaaccagaaccccaggtgggacaggaatcgtggactgatacagatggcactgaagaaaaatacggaggcagagtacttaaaccggacactaaaatgaaaccgtgctatgggtcttttgctaaacctactaatgtgaaaggcggacaggcaaaagtgaaaacagaagaaggcaacaacattgaatatgacattgacatgaacttttttgacttaagatcacaaaaacaaggtcttaaacctaagattgtaatgtatgcagaaaatgtggacctggaatctccagatactcatgttgtgtacaaacctgaagtttcagatgctagttcaaatgctaatcttggacagcagtctatgcccaacagacccaactacattggcttcagagataattttattggtcttatgtactataacagtactggtaacatgggggtgctggctggccaagcatctcagttgaatgcagtggttgacttgcaggacagaaacacagaactgtcttaccaactcttgcttgactccctgggcgatagaaccagatactttagcatgtggaatcaggctgttgacagttatgatcccgatgtgcgtgttattgaaaatcatggtgtggaagatgaacttcccaactactgttttccactggacggcatcggtccgcgaacagatagttacaaggagattcagttaaatggagaccaagcttggaaagatgtaaatccaaatggtatcagtgaacttgttaagggaaatccatttgccatggaaattaaccttcaagccaatctatggcgaagtttcctttattccaatgtggctctgtatctcccagactcgtacaaatacaccccgtccaatgtcactcttccagaaaacaaaaacacctacgactacatgaacgggcgggtggtgccgccatctctagtagacacctatgtgaacattggcgccaggtggtctctggatgctatggacaatgtcaacccattcaaccaccaccgtaacgctggcttgcgttaccgatccatgcttttgggtaacggacgttatgtgcctttccacatacaagtgcctcaaaaattcttcgctgtcaaaaacctgctgcttctcccaggctcctacacttatgagtggaacttcaggaaggatgtgaacatggtgctacagagttccctcggtaacgacctacgggtagatggcgccagcatcagtttcacgagcatcaacctctatgctacctttttccccatggctcacaacaccgcttccacccttgaagccatgctgcggaatgacaccaatgatcagtcattcaacgactatctatctgcagctaacatgctctatcccattcctgccaatgcaaccaatattcccatttccattccttctcgcaactgggcggctttcagaggctggtcatttaccagactcaaaaccaaagaaactccctctttggggtctggatttgacccctactttgtctattctggttctattccctacctggatggtaccttctacctgaaccacacttttaagaaggtttccatcatgtttgactcttcagtgagctggcctggaaatgacaggttactatctcccaacgaatttgaaataaagcgcactgtggatggcgaaggctacaatgtagcccaatgcaacatgaccaaagactggttcttggtacagatgctcgccaactacaacataggctatcagggcttctacattccagaaggatacaaagatcgcatgtattcatttttcagaaacttccagcccatgagcaggcaggtggttgatgaggtcaattacaaagacttcaaggccgtcgccataccctaccaacacaacaactctggctttgtgggttacatggctccgaccatgcgccaaggtcaaccctatcccgctaactatccctatccactcattggaacaactgccgtaaatagtgttacgcagaaaaagttcttgtgtgacagaaccatgtggcgcataccgttctcgagcaacttcatgtctatgggggcccttacagacttgggacagaacatgctttatgccaactcagctcatgctctggacatgacctttgaggtggatcccatggatgagcccaccctgctttatcttctcttcgaagttttcgacgtggtcagagtgcatcagccacatcgcggcatcatcgagacagtctacctgcgtacaccgttctcggccggtaacgctaccacgtaaaaagcttcttgcttcttgcaaacagcagctgcaaccatggcctgcggatcccaaaacggctccagcgagcaagagctcagagccattgtccaagacctgggttgcggaccctattttttgggaacctacgataagcgcttcccggggttcatggcccccgataagctcgcctgtgccattgtaaacacggccggacgtgagacggggggagagcactggttggctttcggttggaacccacgttctaacacctgctacctttttgatccttttggattctcggatgatcgtcttaaacagatttaccagtttgaatatgagggtctcctgcgccgcagcgctcttgctaccaaggaccgctgtattacgctggaaaaatctacccagaccgtgcagggcccccgttctgccgcctgcggacttttctgctgcatgttccttcatgcctttgtgcactggcctgaccgtcccatggacggaaaccccaccatgaaattgctgactggagtgccaaacaacatgcttcattctcctaaagtccagcccaccctgtgtgacaatcaaaaagcactctaccattttctcaatacccattcgccttattttcgctcccatcgtacacacatcgaaagggccactgcgttcgaccgtatggatgtgcaataatgactcatgtaaacaacgtgttgaataaacagcactttattttttacacgtatcaaggctctggattacttatttatttacaagtcgaatgggttctgacgagaatcagaatgacccgcgggcagtgatacgttgcggaactgatacttgggttgccacttgaattcgggaatcaccaacttgggaaccggtatatcgggtaggatgtcactccacagctttctggtcagctgcaaagctcccagcaggtcaggagccgaaatcttgaaatcacaattaggaccagtgctctgagcgcgagagttgcggtacaccggattgcagcactgaaacaccatcagcgacggatgtctcacgcttgccagcacggtgggatctgcaatcatgcccacatccagatcttcagcattggcaatgctgaacggggtcatcttgcaggtctgcctacccatggcgggcacccaattaggcttgtggttgcaatcgcagtgcagggggattagtatcatcttggcctgatcctgtctgattcctggatacacggctctcatgaaagcatcatattgcttgaaagcctgctgggctttactaccctcggtatagaacatcccgcaggacctgctcgaaaactggttagctgcgcagccggcatcattcacacagcagcgggcgtcattgttggctatttgcaccacacttctgccccagcggttttgggtgattttggttcgctcgggattctccttcaaggctcgttgtccattctcgctggccacatccatctcgataatctgctccttctgaatcataatagtgccatgcaggcacttcagcttgccctcataatcattgcagccatgaggccacaacgcacagcctgtacattcccaattatggtgggcgatctgagaaaaagaatgtatcattccctgcagaaatcttcccatcatcgtgctcagtgtcttgtgactagtgaaagttaactggatgcctcggtgctcctcgtttacgtactggtgacagatgcgcttgtattgttcgtgctgctcaggcattagtttaaaagaggttctaagttcgttatccagcctgtacttctccatcagtacacacatcacttccatgcccttctcccaagcagacaccaggggcaagctaatcggattcttaacagtacaggcagcagctcctttagccagaggatcatctttggcaatcttttcaatgcttcttttgccatccttctcaacgatgcgcacgggcgggtagctgaaacctactgctacaagctgcgcctcttctctttcttcttcgctgtcttgactgatgtcttgcatgggaacatgtttggtcttccttggcttctttttggggggtatcgggggaggaggactgtcgctccgttccggagacagggaggattgtgaagtttcgctcaccattaccaactgactgtcggtagaagaacctgaccccacacggcgacaggtgtttctcttcgggggcagaggtggaggcgattgcgaagggctgcggtccgacctggaaggcggatgactggcagaaccccttccgcgttcgggggtgtgctccctgtggcggtcgcttaactgatttccttcgcggctggccattgtgttctcctaggcagagaaacaacagacatggaaactcagccattgctgtcaacatcgccacaagtgccatcacatctcgtcgtcagcgacgaggaaaaggagcagagcttaaccattccaccgcccagtcctgccaccacctctaccctagaagataaggaggtcgacgcatctcatgacatgcagaataaaaaagcgaaagagtctgaaacagacatcgagcaagacccgggctatgtgacaccggtggaacacgaggaagagttgaaacgctttctagagagagaggatgaaaactgcccaaaacagcaagcggataactatcaccaagatgctggaaatagggatcagaacaccgactacctcatagggcttgacggggaagacgcgctccttaaacatctagcaagacagtcactcatagtcaaggatgcattattggacagaactgaagtgcccatcagtgtggaagagctcagccgcgcctacgagcttaaccttttttcacctcgtactccccccaaacgccagccaaacggcacctgcgagccaaatcctcgcttaaacttttatccagcttttgctgtgccagaagtactcgctacttatcacatcttttttaaaaatcaaaaaattccagtctcctgccgcgctaatcgcacccgcgctgacgccctacttaatctgggacctggttcacgcttacctgatatagcttccttggaagaggttccaaaaatcttcgagggtctgggcaataatgagactcgggccgcaaatgctctgcaaaagggagaaaatggcatggatgagcatcacagcgttctggtggaattggagggcgataatgccagactcgcagtactcaagcgaagcgtcgaggtcacacactttgcataccccgctgtcaacctgccccctaaagttatgacggcggtcatggaccagttactcattaagcgcgcaagtcccctttcagaagacatgcatgacccagacgcctgtgatgagggtaaaccagtggtcagtgatgagcagctaacccgatggctggacaccgactctccccgggatttggaagagcgtcgcaagcttatgatggccgtagtgctggttaccgtagaactagagtgtctccggcgtttctttaccgattcagaaaccttgcgcaaactcgaagagaatctgcactacacttttagacacggctttgtgcggcaggcgtgcaagatatctaacgtggaactcaccaacctggtttcctacatgggtattctgcatgagaatcgtctaggacaaagcgtgctgcacagcacccttaagggggaagcccgccgtgattacatccgcgattgtgtctatctctacctgtgccacacgtggcaaaccggcatgggtgtatggcagcaatgtttagaagaacagaacttgaaagagcttaacaagctcttacagaaatctcttaaggttctgtggacagggttcgacgagcgcaccgtcgcttccgacctggcagacctcatcttcccagagcgtcttagggttactttgcgaaacggactgcctgactttatgagccagagcatgcttaacaattttcgctctttcatcctggaacgctccggtatcctgcccgccacctgctgcgcactgccctccgactttgtgcctctcacctaccgcgagtgccccccgccgctatggagtcactgctacctgttccgtctggccaactacctctcctaccactcggatgtgatcgaggatgtgagcggagacggcttgctggagtgtcactgccgctgcaatctgtgcacgccccaccggtccctagcttgcaacccccagttgatgagcgaaacccagataataggcacctttgaactgcaaggccccagcagccaaggcgatgggtcttctcctgggcaaagtttaaaactgaccccgggactgtggacctctgcctacttgcgcaagtttgccccggaagattaccacccctatgaaatcaagttctatgaggaccaatcacagcctccaaaggccgaactttcggcctgcgtcatcacccagggggcaattctagcccaattgcaagccatccaaaaatcccgccaagaatttctactgaaaaagggtaagggggtctaccttgacccccagaccggcgaggaactcaacacaaggttccctcaggatgtcccaacgacgagaaagcaagaagttgaaggtgcagccgccgcccccagaagatatggaggaagattgggacagtcaggcagaggaagcggaggaggacagtctggaggacagtctggaggaagacagtttggaggaggaaaacgaggaggcagaggaggtggaagaagtaaccgccgacaaacagttatccccggctgcggagacaagcaacagcgctatcatctccgctccgagtcgaggaacgcggcggcgtcccagcagtagatgggacgagaccggacgcttcccgaacccaaccaccgcttccaagaccggtaagaaggatcggcagggatacaagtcctggcgggggcataagaatgccatcatctcctgcttgcatgagtgcgggggaaacatatccttcacgcgacgctacttgctattccaccatggggtgaactttccacgcaatgttttgcattactaccgtcacctccacagcccctactatagccagcaaatcccggcaatctcgacagaaaaagacagcggcggcgacctccaacagaaaaccagcagcggcagttaaaaaatacacaacaagtgcagcaacaggaggattaaagattacagccaacgagccagcgcaaacccgagagctaagaaatcggatctttccaaccctgtatgccatcttccagcagagtcggggccaagagcaggaactgaaaataaaaaaccgatctttgcgttcgctcaccagaagttgtttgtatcacaagagcgaagatcaacttcagcgcactcttgaggacgccgaggctctcttcaacaagtactgcgcgctgactcttaaagagtaggcagcgaccgcgcttattcaaaaaaggcgggaattacatcatcctcgtcatgagtaaagaaattcccacgccttacatgtggagttatcagccccaaatgggattggcggcaggcgcctcccaggactactccacccgcatgaattggctcagcgccgggccttctatgatttctcgagttaatgatatacgcgcctaccgaaaccaaatacttttggaacagtcagctcttaccaccacgccccgccaacaccttaatcccagaaattggcccgccgccctagtataccaggaaagtcccgctcccaccactgtattacttcctcgagacgcccaggccgaagtccaaatgactaatgcaggtgcgcagttagctggcggctccaccctatgtcgtcacaggcctcggcataatataaaacgcctgatgattagaggccgaggtattcagcttaacgacgagtcggtgagctctccgcttggtctacgaccagacggaatctttcaaattgccggctgcgggagatcttccttcacccctcgtcagactgttttgactttggaaagttcgtcttcgcaaccccgctcgggcggaatcgggaccgttcaatttgtggaggagtttactccctctgtctacttcaaccctttctccggatctcctgggcactacccggacgagttcataccgaactttgacgcaattagcgagtcagtggacggctacgattgatgtctggtgacgcggctgagctatctcggctgcgacatctagaccactgccgccgctttcgctgttttgcccgggaactcattgagttcatttacttcgaactccccaaggatcaccctcaaggtccggcccacggagtgcggattactatcgaaggtaaaataaactctcgcctgcatcgaattttctcccagcggcccgtgctgatcgagcgagaccagggaaacaccacggtttctatctactgcatttgtaatcacccaggattgcatgaaagcctttgctgtcttatgtgtactgagtttaataaaaactgaattaagactctcctacggactgccgcttcttcaacccggattttacaaccagaagaacgaaacttttcctctcatccaggactctgttaactttacctttcctacttacaaaccagaagctcaacgacaacaccgcttttccagaagcattttccctactaatactactttcaaaaccggaggtgagctccacagtctccccgcagaaaacccttgggtggaagcgggccttgtagtgctaggaattcttgcgggcgggcttgtgattattctttgctacctatacacaccttgcttcactttcctagtggtgttgtggtattggtttaaaaaatggggcccatactagtcttgcttgttttactttcgcttttgggaccgggttctgccaactacaatccatgtctagactttgacccagaaaactgcacacttacttttgcacccgacacaagccgcatctgtggagttcttattaagtgcggatgggaatgcaggtccgttgaaattacacacaataacaaaacctggaacaataccttatccaccacatgggagccaggagttcccgagtggtacactgtctctgtccgaggtcctgacggttccatccgcattagtaacaacacttttattttttctacaatgtgcgatctggccatgttcatgagcaaacagtattctctatggcctcccagcaaggacaacattgtaacgttctccattgcttattgcttgtgcgcttgccttcttactgctttactgtgcgtatgcatacacctgcttgtaaccactcgtatcaaaaacgccaataacaaagaaaaaatgccttaacctctttctgtttacagacatggcttttcttacagctctcatacttgtcagcattgtcactgccgctcacggacaaacagtcgtctctatccctctaggtcataattacactctcataggacccccaatcacttcagaggtcatctggaccaaactgggaagcgttgattactttgatataatctgtaacaaaacaaaaccaataatagtaacctgcaacatacaaaatcttacattaattaatgttagcaaagtttacagcggttactattatggttatgacagatacagtagtcaatatagaaattacttggttcgtgttacccagtccaaaaccacgaaaatgccaaatatggcagaaattcgatccgatgacaattctctagaaacttttacatcttccaccacacctgacgaaaaaaatatcccagattcaatgattgcaattatcgcagcggtggcagtggtgatggcactaacagtaatatgcatgcttttatatgcttgtcgctacaaaaagtttcatcctaaaaaacaagatctcctactaaggcttaacatttaatttctttttacacagccatggtttccactaccacattccttatgcttactagtatagcaactctgacttctgctcgctcacacctcactgtaactataggctcaaactgcacactaaaaggacctcaaggtggtcatgtcttttggtggagaatatatgacaatggatggtttacaaaaccatgtgaccaacctggtagatttttctgcaacggcagagacctaaccattatcaacgtgacagcaaatgacaaaggcttctattatggaaccgactataaaagtagtttagattataacattattgtactgccatccaccactccagcgccccgcaaaactactttctctagcagcagtgccgctaacaatacaatttccaatccaacctttaccgcgcttttaaaacgcactgtgaataattctacaacaatttccacttcaacaatcagcatcatcgctgccgtgacaattggaatatctattcttgtttttaccataacctactacacctgctgctataaaaaagacgaacataaaggtgatccattacttagatttgatatttaatttgttctttttttttttatttacagtatggtgaacaccaatcatggtacctagaaatttcttcttcaccatactcatctgtgcttttaatgtttgcgctactttcacagcagtagccacagcaagcccagactgtataggagcatttgcttcctatgcactttttgcttttgtcacttgcatctgcgtatgtagcatagtctgcctggttattaattttttccaacttctagactggatccttgtgcgaattgcctacctgcgccaccatcccgaataccgcaaccaaaatatcgcggcacttcttagacttatctaaaaccatgcaggctatactaccaatatttttgcttctattgcttccctacgctgtctcaaccccagctacctatagtactccaccagaacaccttagaaaatgcaaattccaacaaccgtggtcatttcttgcttgctatcgagaaaaatctgaaattcccccaactttaataatgattgctggaataattaatgtaatctgttgcaccataatttcatttctgatataccccctatttgattttggctggaatgctcccaatgcacatgattattcccaagacccagaggaacacattcccctacataacatgcaacaaccaatagcgctaatagaatacgaaagtgaaccacaacccccactactccctgctattagttacttcaacctaaccggcggagatgactgaaacactcaccacctccaattccgccgaggatctgcttgatatggacggccgcgtctcagaacagcgactcgcccaactacgcatccgccagcagcaggaacgcgtggccaaagagctcagagatgtcatccaaattcaccaatgcaaaaaaggcatattctgtttggtaaaacaagccaaaatatcctacgagatcaccgctaccgaccatcgcctctcttacgagcttggcccccaacgacaaaaatttacctgcatggtgggaatcaaccccatagttatcacccaacaaagtggagatactaagggttgcattcactgctcctgcgattccatcgagtgcacctacaccctgctgaagaccctatgcggactaagagacctgctacccatgaattaaaaaaatgattaataaaaaatcacttacttaaaatcagcaataaggtctctattgaaattttctcccagcagcacctcacttccctcttcccaactctggtattctaaaccccgttcagcggcatactttctccatactttaaaggggatgtcaaattttagctcctctcctgtacccacaatcttcatctctttcttcccagatgaccaagagagtccggctcagtgactccttcaaccctgtctacccctatgaagatgaaagcacctcccaacacccctttataaacccagggtttatttccccaaatggcttcacccaaagcccagacggagttcttactttaaaatgtttaaccccgctaacaaccacaggcgggtctctacagctaaaagtgggagggggacttacagtagatgacactgatgggaccttacaagaaaacataggtgccaccacaccacttgttaagactgggcactctataggtttatccctaggagccggattgggaacagatgaaaataaactttgtaccaaattgggagaaggacttacattcaattcaaacaacatttgcattgatgacaatattaacaccctgtggacaggagttaaccccaccgaagccaactgtcaaatgatggactccagtgaatctaatgattgcaaattaattctaacactagttaaaactggagccctagtcactgcatttgtttatgttataggagtatctaacaattttaatatgctaactacatacagaaatataaattttactgcggagctgttttttgattctgcgggtaatttactaactagcctgtcatccctaaaaactccacttaatcataaatcaggacaaaacatggctactggtgccattactaatgctaaaagtttcatgcccagcacaactgcttatcctttcaataataattctagagaaaaagaaaactacatttacggaacttgtcactacacagctagtgatcacactgcttttcccattgacatatctgtcatgcttaaccaaagagcaataagagctgatacatcatattgtattcgtataacttggtcctggaacacaggagatgccccagaggggcaaacctctgctacaaccctagttacctccccatttaccttttactacatcagagaagacgactgacaaataaagtttaacttgtttatttgaaaatcaattcacaaactccgagtagttattttgcctcccccttcccatttaacagaatataccaatctctccccacgcacagctttaaacatttggataccattagagatagacatggttttagattccacattccaaacagtttcagagcgagccaatctggggtcagtgatagataaaaatccatcgggatagtcttttaaagcgctttcacagtccaactgatgcggatgcgactccggagtctggatcacggtcatctggaagaagaacgatgggaatcataatccgaaaacgggatcgggcgattgtgtctcatcaaacccacaagcagccgctgtctgcgtcgctccgtgcgactgctgtttatgggatcgggatccacagtgtcctgaagcatgattttaatagcccttaacattaactttctggtgcgatgcgcgcagcaacgcattcttatttcacttagattaatacagtaggtacagcacattatcacaatattgtttaataaaccataattaaaagcactccagccaaaactcatatctgatataatcgcccctgcatgaccatcataccaaagtttaatataaattaaatgacgttccctcaaaaacacactacccacatacatgatctcttttggcatgtgcatattaacaatctgtctgtaccatggacaacgttggttaatcatgcagcccaatataaccttccggaaccacactgccaacaccgctcccccagccatgcattgaagtgaaccctgctgattacaatgacaatgaagaatccaattctctcgaccgtgaatcacttgagaatgaaaaatatctatagtagcacaacatagacataaatgcatgcatcttctcataatttttaactcctcaggatttagaaacatatcccaaggaataggaagctcttgcagaacagtaaagctggcagaacaaggaagaccacgaacacaacttacactatgcatagtcatagtatcacaatctggcaacagcgggtggtcttcagtcatagaagctcgggtttcattttcctcacaacgtggtaactgggctctggtgtaaggatgatgtctggcgcatgatgtcgagcgtgcgcacaaccttgtcataatggagttgcttcctgacattctcgtattttgtatagcaaaacgcggccctggcagaacacactcttcttcgccttttatcctgccgcttagcgtgttccgtgtgatagttcaagtacagccacactcttaagttggtcaaaagaatgctggcttcagttgtaatcaaaactccatcacatctaatcgttctgaggaaatgatccacggtagcatatgcaaatcccaaccaagcaatgcaactggattgcgtttcaagcaggagaggagagggaagagacggaagaaccatgttaatttttattccaaacgatctcgcagtacttcaaattgtagatcgcgcagatggcatctgtcgcccccactgtgttggtgaaaaagcacagctagatcaaaagaaatgcgattttcaaggtgctcaacggtggcttccagcaaagcctccacgcgcacatccaagaacaaaagaataccaaaagaaggagcattttctaactcctcaatcatcatattacagtcctgcaccattcccagataattttcagctttccagccttggattattcgtgtcatttcttgtggtaaatccaatccacacattacaaacaggtcccggagggcgccctccaccaccattcttaaacacaccctcataatgacaaaatatcttgctcctgtgtcacctgtagcaaattgagaatggcaacatcaattgacatgccgttggctctaagttcttctctaagttctagttgtaaatactctttcatattatcaccaaactgcttagccagaagccccccgggaacaagagcaggacacgctacagtgcagtacaagcgcagacctccccaattggctccagcaaaaacaagattggaataagcatattgggaaccaccagtaatgtcatcaaagttgctggaaatataatcaggcagagtttgttgtaaaaattgaataaaagaaaaatttgccaaaaaaacattcaaaacctctgggatgcaaatgcaataagttaccgcgctgcgctccaacattgttagttttgaatgagtctgcaaaaaataaaaaaacaagcgtcatatcagagtagcctgacgaacaggtggataaatcagtctttccatcacaagacaagccacagggtctccagcccgaccctcgtaaaacctgtcatcgtgattaaacaacagcaccgaaagttcctcgcggtgaccagcatgaataattcttgatgaagcatacaatccaaacatgttagcatcagttaaagacaaaaaacagccaatatagcctctgggtataattatgcttaatcgtaaatatagcaaagccacccctcgcggatacaaagtaaaaggcacaggagaataaaaaatataattattcctttgctgctgttcaggcaacgtcgcccccggtccctctaaatacacatacaaagcctcatcagccatggcttaccagacaaagtacagcaggcacacaaagcacaagctctaaagtcactcaccaacctgtccacagtatatatacacaaaccctaaactgacgtaatggggctaaagtacacaaaatcccgccaaacccaacacacaccccgaaactgcgtcaccacaaaagtacagtttcacttccgcaatcccaacaagcggcacttcctctttctcacgggacgtcacatccgcttaacttgcaacctcattttcccacggccgcgccgccccttttagccgttaaccccacagccaattaccacacagcccacactttttaaaatcacctcatttacatattggcaccattccatctataaggtatattattgatgatg

SEQ ID NO: 203 - DNA, 35522 bp, Unknown
  Description of Unknown: Human adenovirus 16 sequence
cattatctataatataccttatagatggaatggtgccaacatgtaaatgaggtaatttaaaaaagtgcgcgctgtgtggtgattggctgcggggtgaacggctaaaaggggcgggcaatgctgggatgtgacgtaacttatgtgggaggagttatgttgcaagttatcgcggtaaaggtgacgtaaaacgaggtgtggtttggacacggaagtagacagttttcccacgtttactgacaggatatgaggtagttttgggcggatgcaagtgaaaattctccattttcgcgcgaaaactgaatgaggaagtgaatttctgagtcatttcgcggttatgacagggtggagtatttgccgagggccgagtagactttgaccgtttacgtggaggtttcgattaccgtgtttttcacctaaatttccgcgtacggtgtcaaagtcctgtgtttttacgtaggtgtcagctgatcactagggtatttaaacctgtcgagttccgtcaagaggccactcttgagtgccagcgagaagagttttctcctccgcgctgcgagtcagttttgcgctttgaaaatgagacacctgcgattcctgccacaggagattatctccagcgagaccgggatcgaaatactggagtttgtggtaaataccctgatgggagatgacccggaaccgccagtgcagcctttcgatccacctacgctgcacgatctgtatgatttagaggtagacgggcctgatgatcccaatgaggaagctgtaaatgggttttttactgattctatgctgctagctgccgatgaaggattggacataaaccctcctcctgagacccttgataccccaggggtggttgtggaaagcggcagaggtgggaaaaaattgcctgatctgggagcagctgaaatggacttgcgttgttatgaagagggttttcctccgagtgatgatgaagacggggaaactgaacagtccatccataccgcagtgaatgagggagtaaaagctgccagcgatgtttttaagttggactgtccggagctgcctggacatggctgtaagtcttgtgaatttcacaggaataacactggaatgaaagaactattgtgctcgctttgctatatgagaatgcactgccactttatttacagtaagtgtatttaagtgaaatttaaaggaatagtgtagctgtttaataactgttgaatggtagatttatgtttttgcttgcgattttttgtaggtcctgtgtctgatgatgagtcaccttctcctgattcaactacctcacctcctgaaattcaggcgcccgtacctgcaaacgtatgcaagcccattcctgtgaagcctaagtctgggaaacgccctgctgtggataagcttgaggacttgttggagggtggggatggacctttggaccttagtacccggaaactgccaaggcaatgagtgccctgcagctgtgtttatttagtgacgtcatgtaataaaattatgtcagctgctgagtgttttattgcttcttgggtggggacttggatatataagtaggagcagatctgtgtggttagctcatagcaacctgctgccatccatggaggtttgggctatcttggaagacctgagacagactaggctactgctagaaaacgcctcggacggagtctctggcttttggagattctggttcggtggcgatctagctaggctagtgtttaggataaaacaggactatagggaagaatttgaaaagttattggacgacagtccaggactttttgaagctcttaacttgggccatcaggctcattttaaggagaaggttttatcagttttagatttttctactcctggtagaactgctgctgctgtagcttttcttacttttatattggataaatggatccgccaaacccacttcagcaagggatacgttttggatttcatagcagcagctttgtggagaacatggaaggctcgcaggatgaggacaatcttagattactggccagtgcagcctctgggagtagcagggatactgagacacccaccggccatgccagcggttctggaggaggagcagcaggaggacaatccgagagccggcctggaccctccggtggaggagtagctgacttgtttcctgaactgcgacgggtgcttactaggtctacgtccagtggacaggacaggggcattaagagggaaaggaatcctagtgggaataattcaagaaccgagttggctttaagtttaatgagccgtaggcgtcctgaaactgtttggtggcatgaggttcagagcgaaggcagggatgaagtttcaatattgcaggagaaatattcactagaacaacttaagacctgttggttggaacctgaggatgattgggaggtggccattaggaattatgctaagatatctctgaggcctgataaacagtatagaattactaagaagattaatattagaaatgcatgctacatatcagggaatggggcagaggttataatagatacacaagataaagcagcttttagatgttgtatgatgggtatgtggccaggggttgtcggcatggaagcagtaacatttatgaatattaggtttaaaggggatgggtataatggcattgtatttatggctaacactaagctgattctacatggttgtagcttttttgggtttaataatacttgtgtagaagcttgggggcaagttagtgtgaggggttgtagtttttatgcatgctggattgcaacatcaggtagggtcaagagtcagttgtctgtgaagaaatgcatgtttgagagatgtaatcttggcatactgaatgaaggtgaagcaagggtccgccactgcgcagctacagaaactggctgcttcattctaataaagggaaatgccagtgtgaagcataatatgatctgtggacattcgaatgagaggccttatcagatgctgacctgcgctggtggacattgcaatattctggctaccgtgcatatcgtttcccatgcacgcaagaaatggcctgtatttgaacataatgtgattaccaagtgcaccatgcacataggtggtcgcaggggaatgtttatgccttaccagtgtaacatgaatcatgtgaaggtgatgttggaaccagatgccttttccagagtaagcttaacaggaatctttgatatgaatattcaactatggaagatcctgagatatgatgacactaaaccgagggtgcgcgcatgcgaatgcggaggcaagcatgctagattccagccggtgtgcgtggatgtgactgaagacctgagacccgatcatttggtgcttgcctgcactggagcggagttcggttctagtggtgaagaaactgactaaagtgagtagtgggacgagctgtggaggtgggactttgaggttggtaaggtgggcagattgggtaaattttgttaatttctgtcttgcagctgccatgagtggaagcgcttcttttgaggggggagtatttagcccttatctgacgggcaggctcccaccatgggcaggagttcgtcagaatgtcatgggatccactgtggatgggagacccgtccagcccgccaattcctcaacgctgacctatgccactttgagttcgtcaccattggatgcagctgcagccgccgccgctactgctgccgccaacaccatccttggaatgggctattacggaagcatcgttgccaattccagttcctctaataacccttcaaccctggctgaggacaagctacttgttctcttggctcagctcgaggccttaacccaacgcttaggcgaactgtctaagcaggtggcccagttgcgtgagcaaactcagtctgctgttgccacagcaaagtctaaataaagatcttaaatcaataaataaagaaatacttgttataaaaacaaatgaatgtttatttgatttttcgcgcgcggtatgccctggaccatcggtctcgatcattgagaactcggtggatcttttccagtaccctgtaaaggtgggattgaatgtttagatacatgggcattagtccgtcccgggggtggagatagctccattgaagagcctcttgctccggggtagtgttataaatcacccagtcatagcaaggtcggagtgcatggtgttgcacaatatcttttaggagcagactaattgcaacggggaggcccttagtgtaggtgtttacaaatctgttgagctgggacgggtgcatccggggtgaaattatatgcattttggactggatcttgaggttggcaatgttgccgcctagatcccgtctggggttcatattgtgcagaaccaccaagacagtgtatccggtgcacttgggaaatttatcatgcagcttagagggaaaagcatgaaaaaatttggagacgcctttgtgaccccccagattctccatgcactcatccataatgatagcgatggggccgtgggcagcggcacgggcgaacacgttccgggggtctgaaacatcatagttatgctcctgagtcaggtcatcataagccattttaataaactttgggcgaagggtgccagattgggggatgaaagttccctctggcccgggagcatagtttccctcacatatttgcatttcccaggctttcagttcagagggggggatcatatccacctgcggggctataaaaaatactgtttctggagccggggtgattaactgggatgagagcaaattcctaagcagctgagacttgccgcacccagtgggaccgtaaatgaccccaattacgggttgcagatggtagtttagggagcgacagctgccgtcctcccggagcaggggggccacttcgttcatcatttcccttacatggatattttcccgcaccaagtccgttaggaggcgctctcccccaagggatagaagctcctggagcgaggagaagtttttcagcggcttcagcccgtcagccatgggcattttggaaagagtctgttgcaagagctcgagccggtcccagagctcggtgatgtgctctatggcatctcgatccagcagacctcctcgtttcgcgggttgggacggctcctggagtagggaatcagacgatgggcgtccagcgctgccagggtccgatccttccatggtcgcagcgtccgagtcagggttgtttccgtcacggtgaaggggtgcgcgcctggttgggcgcttgcgagggtgcgcttcagactcatcctgctggtcgagaaccgctgccgatcggcgccctgcatgtcggccaggtagcagtttaccatgagttcgtagttgagcgcctcggccgcgtggcctttggcacggagcttacctttggaagttttatggcaggcggggcagtagatacatttgagggcatacagcttgggcgcgaggaaaatggattcgggggagtatgcatccgcaccgcaggaggcgcagacggtttcgcactccacgagccatgtcagatccggctcatcggggtcaaaaacaagttttccgccatgttttttgatgcgtttcttacctttggtttccatgagttcgtgtccccgctgggtaacaaagaggctgtccgtgtccccgtagactgactttatgggcctgtcctcgagcggagtgccgcggtcctcttcgtagaggaacccagcccactctgatacaaaagcgcgtgtccaggccagcacaaaggaggccacgtgggaggggtagcggtcgttgtcaaccagggggtccaccttctctacggtatgtaaacacatgtccccctcctccacatccaagaatgtgattggcttgtaagtgtaggccacgtgaccaggggtccccgccgggggggtataaaagggggcgggcctctgttcgtcttcactgtcttccggatcgctgtccaggagcgccagctgttggggtaggtattccctctcgaaggcgggcatgacctctgcactcaggttgtcagtttctaggaacgaggaggatttgatattgacagtaccagcagagatgcctttcataagactctcgtccatctggtcagaaaacacaatcttcttgttgtccagcttggtggcaaatgatccatagagggcattggatagaagcttggcgatagagcgcatggtttggttcttttccttgtccgcgcgctccttggcggcgatgttaagctggacgtactcgcgcgccacacatttccattcagggaagatggttgtcagttcatccggaactattctgactcgccatcccctattgtgcagggttatcagatccacactggtggctacctcgcctcggaggggctcattggtccagcagagtcgacctccttttcttgaacagaaaggggggagggggtctagcatgaactcatcaggggggtccgcatctatggtaaatattcccggtagcaaatccttgtcaaaatagctgatggtggcgggatcatccaaagtcatctgccattctcgaactgccagcgcgcgctcataggggttaagaggggtgccccagggcatggggtgggtgagcgcggaggcatacatgccacagatatcgtagacatagaggggctcttcgaggatgccgatgtaagtgggataacagcgcccccctctgatgcttgctcgcacatagtcatagagttcatgtgagggggcgagaagacccgggcccagattggtgcggttgggtttttccgccctgtaaacgatctggcgaaagatggcatgggaattggaagagatagtaggtctctggaatatgttaaaatgggcatgagggaggcctacagagtcccttatgaagtgggcatatgactcttgcagcttggctaccagctcggcggtgacaagtacgtctagggcacagtagtcgagagtttcctggatgatgtcataacgcggttggtttttcttttcccacagctcgcggttgagaaggtattcttcgcgatccttccagtactcttcgaggggaaacccgtctttttctgcacggtaagagcccaacatgtagaattgattgactgccttgtagggacagcatcccttctccactgggagagagtatgcttgggctgcattgcgcagcgaggtatgagtgagggcaaaagtgtccctgaccatgactttgaggaattgatacttgaagtcgatgtcatcacaggccccctgttcccagagttggaagtccacccgcttcttgtaggcggggttgggcaaagcgaaagtaacatcattgaagaggatcttgccggccctgggcataaaatttcgggtgattctgaaaggctgagggacctctgctcggttattgataacctgagcggccaagacgatctcatcaaagccattgatgttgtgccccactatgtacagttctaagaatcgaggtgtgcccctgacatgaggcagcttcttgagttcttcaaaagtgaggtctgtagggtcagtgagagcatagtgttcgagggcccattcgtgcaggtgagggttcgctttgaggaaggaggaccagaggtccactgccagtgctgtttgtaactggtcccggtactgacgaaaatgctgcccgactgccatcttttctggggtgacgcaatagaaggtttgggggtcctgctgccagcgatcccacttgagttttatagccaggtcataggcgatgttgacgagccgctggtctccagagagtttcatgaccagcatgaaggggattagctgcttgccaaaggaccccatccaggtgtaggtttccacatcgtaggtgaggaagagcctttctgtgcgaggatgagagccaatcgggaagaactggatctcctgccaccagttggaggaatggctgttgatgtgatggaagtagaactccctgcgacgcgccgagcattcatgcttgtgcttgtacagacggccgcagtactcgcatcgattcacgggatgcacctcatgaatgagttgtacctgacttcctttgacgagaaatttcagtggaaaattgaggcctggcgcttgtacctcgcgctctactatgttgtctgcatcggcatgaccatcttctgtctcgatggtggtcatgctgacgagccctcgcgggaggcaagtccagacctcggcgcggcaggggcggagctcgaggacgagagcgcgcaggtcggagctgtccagggtcctgagacgctgcggagtcaggttagtaggcagtgtcaggagattgacttgcatgatcttttcgagggcgtgagggaggttcagatggtacttgatctccacgggtccgttggtggagatgtcgatggcttgcagggttccgtgccccttgggcgctaccaccgtgcccttgtttttccgtttgggcggcggtggctctgttgcttcttgcatgtttagaagcggtgtcgagggcgcgcaccgggcggcaggggcggctcgggacccggcggcatggccggcagtggtacgtcggcgccgcgcgcgggtaggttctggtactgcgccctgagaagacttgcatgcgcgacgacgcggcggttgacatcctggatctgacgcctctgggtgaacgctaccggccccgtgagcttgaacctgaaagagagttcaacagaatcaatctcggtatcgttgacggcggcttgcctaaggatttcttgcacgtcgccagagttgtcctggtaggcgatctcggccatgaactgctcgatctcttcctcttgaagatctccgcggcccgctctctcgacggtggccgcaaggtcgttggagatgcgtccaatgagttgagagaatgcattcatgcccgcctcgttccagacgcggctgtagaccacagccccctcgggatctctcgcgcgcatgaccacctgggcgaggttgagctccacgtggcgggtgaagaccgcatagttgcataggcgctggaaaaggtagttgagtgtggtggcgatgtgctcggtgacgaagaaatacatgatccatcgtctcagcggcatctcgctaacatcgcccagcgcttccaagcgctccatggcctcgtagaagtccacggcaaagttgaaaaactgggagttacgcgcggacacggtcaactcctcttccagaagacggatgagttcggcgatggtggtgcgcacctcgcgctcgaaagcccccgggatttcttcctcaatttcttcttcttccactaacatctcttcctcttcaggtggggctgcaggaggagggggaacgcggcgacgccggcggcgcacaggcagacggtcgatgaatctttcaatgacctctccgcggcggcggcgcatggtctcggtgacggcacgaccgttctccctgggtctcagagtgaagacgcctccgcgcatctccctgaagtggtgactgggaggctctccgttgggcagggacaccgcgctgattatgcattttatcaattgccccgtaggtactccgcgcaaggacctgatcgtctcaagatccacgggatctgaaaacctttcgacgaaagcgtctaaccagtcgcaatcgcaaggtaggctgagcactgtttcttgcgggcgggggcggctagacgctcggtcggggttctctctttcttctccttcctcctctttggagggtgagacgatgctgctggtgatgaaattaaaataggcagttttgagacggcggatggtggcgaggagcaccaggtctttgggtccggcttgttggatgcgcaggcgatgggccattccccaagcattatcctgacatctggccagatctttatagtagtcttgcatgagtcgttccacgggcacttcttcttcgcccgctctgccatgcatgcgagtgatcccgaacccgcgcatgggctggacaagtgccaggtccgctacaaccctttctgcgaggatggcttgctgcacctgggtgagggtggcttggaagtcgtcaaagtccacgaagcggtggtaagccccggtgttgattgtgtaggagcagttggccatgactgaccagttgactgtctggtgccccggacgcacaatctcggtgtacttgaggcgcgagtaggcgcgggtgtcaaagatgtaatcgttacaggtgcgcaccaggtactggtagccgatgagaaagtgaggcggcggctggcggtataggggccatcgctctgtagccggggcgccaggggcgaggtcttccagcatgaggcggtgataaccgtagatgtacctggacatccaggtgataccggaggcggtggtggatgcccgcgggaactcgcgtacgcggttccagatgttgcgcagcggcatgaagtagttcatggtaggcacggtttggcccgtgagacgcgcacagtcgttgatgctctagacatacgggcaaaaacgaaagcggtcagcggctcgtctccgtggcctggaggctaagcgaacgggttgggctgcgcgtgtaccccggttcgaatctcggatcaggctggagccgcagctaacgtggtactggcactcccgtctcgacccaggcctgcacaaaacctccaggatacggaggcgggtcgttttttttttgctttttcctggatgggagccagtgctgcgtcaagctttagaacactcagttctcggggctgggagtggctcgcgcccgtagtctggagaatcaatcgccagggttgcgttgcggtgtgccccggttcgagtcttagcgcgccggatcggccggtttccgcgacaagcgagggtttggcagcctcgtcatttctaagaccccgccagccgacttctccagtttacgggagcgagccctcttttttttgttttttgttgcccagatgcatcccgtgctgcgacagatgcgcccccagcaacagcccccttctcagcagcagctacaacaacagccacaaaaggctcttcctgctcctgtaactactgcggctgcagccgtcagcggcgcgggacagcccgcctatgatctggacttggaagagggcgagggattggcgcgcctgggggctccatcgcccgagcggcacccgcgggtgcaactaaaaaaggactctcgcgaggcgtacgtgccccaacagaacctattcagggacaggagcggcgaggagccagaggagatgcgagcatctcgatttaacgcgggtcgcgagctgcgccacggtctggatcgaagacgggtgctgcaagacgaggattttgaggtcgatgaagtgacagggatcagcccagctagggcacatgtggccgcggccaacctagtctcggcctacgagcagaccgtgaaggaggagcgcaacttccaaaaatcttttaacaaccatgtgcgcaccctgatcgcccgcgaggaagtgaccctgggtctgatgcacctgtgggacctgatggaggctatcacccagaaccccactagcaaacccctgacagctcagctgtttctggtggttcaacatagcagggacaacgaggcattcagggaggcgttgttgaatatcaccgagcctgatgggagatggctgtatgatctgattaacatcctgcaaagtattatagtgcaggaacgtagcctgggtttggctgagaaagtggcagctatcaactactcggtcttgagcctgggcaaatactacgctcgcaagatctacaagaccccctacgtacccattgacaaggaggtgaagatagatgggttttacatgcgcatgactctcaaggtgttgactttaagcgacgatctgggggtgtatcgcaatgacaggatgcaccgcgcggtgagcgccagcaggaggcgcgagctgagcgacagagaacttatgcacagcttgcaaagggctctaacgggggccggaactgatggggagaactactttgacatgggagcggacttgcaatggcaacccagtcgcagggccatggaggctgcagggtgtgagcttccttacatagaagaggtggatgaagtcgaggacgaggagggcgagtacttggaagactgatggcgcgacccgtatttttgctagatggaacaacagcaggcaccggaccccgcaatgcgggcggcgctacagagccagccgtccggcattaactcctcggacgattggacccaggccatgcaacgtataatggcgctgacgacccgcaaccccgaagcctttagacagcaaccccaggccaaccgcctttcggccatactggaggccgtagtgccctcccgctccaaccccacccacgagaaggtcctggctatcgtgaacgcgctggtggagaacaaggccatccgtcccgatgaggccgggctggtatacaatgctcttttggagcgcgtggcccgttacaacagcagcaacgtgcagaccaacctggaccggatggtgaccgatgtgcgcgaggctgtgtctcagcgcgagcggttccagcgcgacgccaacttggggtcattggtagcgctaaacgctttccttagcacccagcccgccaacgtgccccgtggtcagcaagactatacaaactttttgagtgcattgagactcatggtatctgaggtgccccagagcgaggtgtaccagtccgggccagattacttcttccagaccagcagacagggcttgcagacagtgaacctgacccaggctttcaagaacctgaagggtctgtggggagtgcacgccccagtaggagatcgcgcgaccgtgtctagcttgctgactcccaactcccgcctgctgctgctgctggtatcccccttcactgacagcggtagcatcgaccgcaactcctacttgggctacctgcttaacctgtatcgcgaggctataggacagagccaggtggacgagcagacctatcaagaaatcacccaagtgagccgcgccctgggtcaggaagacacaggcggtttggaagccaccctgaacttcttactaaccaaccggtcgcagaagatccctcctcagtatgcgcttaccgctgaggaggagcggatcctaagatacgtgcaacagagcgttggactgtttttgatgcaggagggggcgacacctaccgccgcgctggatatgacagctcgaaacatggagcccagcatgtatgctagtaacaggcctttcattaacaaactgctggactacctgcacagggcggccgccatgaactctgattatttcaccaatgctattctgaacccacactggctgcccccacctggtttctacactggcgaatacgacatgcccgatcccaatgacgggttcctatgggacgatgtggacagtagcatattttccccgccgccaggttatacggtttggaagaaggaagggggcgatagaaggcactcttccgtatcgttgcccggaacggctggtgctgccgcggccgtgcccgaagctgcgagtcctttccctagcttgtccttttcactaaacagcgttcgcagcagtgaactggggagaataaaccgcccgcgcttgatgggcgaggatgagtacttgaatgactctttgctgaggccagagagggaaaagaacttccctaacaatggaatagagagcctggtggataagatgagtagatggaagacctatgcgcaggatcacagagacgagcccaggatcttgggggctacaagcagaccgagccgtagacgccagcgccacgacaggcagatgggtcttgtgtgggacgacgaggactctgccgatgacagcagcgtgttggacttgggtggaaaaggagttggcaacccgttcgctcatctgcgtccccgtttcggtcgcatgttgtaaaagtgaaagtaaaaataaaaaggcaactcaccaaggccatggcaaccgagcgtgcgttcgttcttttttttgttatctgtatctagtacgatgaggagacgagccgtgctaggcggagcggtggtgtatccggagggtcctcctccttcttacgagagcgtgatgcagcaacaggcggcgatgatacagcccccactggaggctcccttcgtaccccctcggtacctggcgcctacggaagggagaaatagcattcgttactcggagctgtcaccccagtacgataccaccaagttgtatctggtggacaacaagtcggcggacatcgcctccctgaactatcagaacgaccacagcaacttcctgaccacagtggtgcagaacaatgactttacccccacggaggctagcacccagaccattaactttgacgagcggtcgcggtggggcggtcagctgaagaccattatgcacaccaacatgcccaacgtgaacgagtacatgttcagcaacaagtttaaggcgagggtgatggtatctaggaaggctcctgaaggtgttacagtaaatgatcataaagatgatattttgaaatatgagtggtttgagttcactttaccagaaggtaacttctcagctaccatgaccatcgacctgatgaacaatgccatcattgacaactacctgaaaattggcagacagaatggagtgctggaaagtgacattggtgttaagtttgacactagaaacttcaggctcgggtgggaccccgaaactaagttgattatgccaggggtctacacttatgaggcattccatcctgacattgttttgttgcctggttgcggggtagattttactgaaagccgacttagcaacttgcttggcatcaggaagagacatccattccaggagggtttcaaaatcatgtatgaagatcttgaagggggtaatattcctgcccttttggatgtcactgcctatgaggaaagcaaaaaggataccactactgaaacaggcgaaaaggcggtggttaaaacaaccacagtggctgttgcagaggaaaccagtgaagatgataatataactagaggagatacttatataactgaaaaacaaaaacgtgaagctgcagctgcagaactattacttatgtctgaagttaaaaaagagttaaagatccaacctttagaaaaagacagcaagaatagaagctacaatgtcttggaagacaaaatcaacacagcctaccgcagctggtacctgtcctacaattatggtaaccctgagaaaggaataaggtcctggacactgctcaccacttcggatgtcacctgtggagccgagcaggtctactggtcgctccccgacatgatgcaagaccccatcaccttccgctcctcgagacaagtcaacaactacccagtagtgggtgcagagcttatgccggtcttctcaaagagtttctacaatgagcaagccgtgtactctcagcagctccgacagtccacctcgctcacgcacgtcttcaaccgcttccctgagaaccagatcctcatccgcccgccggcgcccacaattaccaccatcagtgaaaacgttcctgctctcacagatcacgggaccctgccgttacgcagcagtatccggggagtccagcgcgtgaccgttactgacgccagacgtcgcacctgtccctacgtttacaaggccctgggcatagtcgcgccgcgcgttctttcaagccgcactttctaaaaaaaaaaaaaaatgtccattctcatctcgcccagtaataataccggttggggactgcatgcgcccaccaagatgtacggaggcgcccgcaaacgctctacccagcaccccgtgcgcgttcgcggtcatttccgcgctccctggggcgccctcaagggccgtacccgcactcggaccacggtcgatgatgtgatcgaccaggtggttgccgatgctcgtaattatactcctactgcgcctacatctactgtggatgcagttattgacagtgtagtggcagacgctcgcgcctatgctcgccggaagagccgaaggaggcgcatcgccaggcgccacagggctactcccgctatgcgagctgcaaaagctattctgcggagggccaaacgtgtgggacgaagagccatgcttagagcggccagacgcgcggcttctggtgctagcagcggcaggtcccgcaggcgcgcggccacggcggcagcagcggccattgccaacatggcccaaccgcgaagaggcaatgtgtattgggtgcgcgatgccactaccggccagcgcgtgcccgtgcgcacccgcccccctcgcacttagaagatactgagcagtctccgatgttgtgtcccagcggcaagtatgtccaagcgcaaatacaaggaagagatgctccaggtcatcgcgcctgaaatctacggtccgccgatgaaggatgaaaaaaagccccgcaaaatcaagcgggttaaaaaggacaaaaaagaagaagatggcgatgatggactggtggagtttgtgcgcgagttcgcgccaagacggcgcgtgcagtggcgcggtcgaaaagtacgccaagtgcttagacccgggaccactgtggtctttacacctggcgagcgttccagcactacttttaaacggtcctatgatgaggtgtatggggatgacgatattattgagcaggcggcagaccgccttggcgagtttgcttatggcaagcgcacaagatccagtcccaaagaggaggcggtatctattcccttggatcatggaaatcccacccctagcctcaaaccagtcaccctgcagcaagtgctgcccgtacctgcgagcagaggcgtaaagcgcgagggtgaggacctatatcccaccatgcagctaatggtgcccaagcggcagagattagaagacgtactggagaaaatgaaagtggatgccgatatccagcctgaggtgaaagtgagacccatcaaggaagtggcgccaggtttgggagtacaaacctttgacatcaagattcccactgagtccatggaagtgcagaccgaacctgcaaaacccacagtcacctcaattgaggttcagacggaaccctggatgcccgcgcccgttgccgcccccagcaccactagaagatcacgtcgaaagtatggcccagcaagtctgctaatgcccaactatgctctgcacccatccatcattcccactccgggttacagaggcactcgctactatcgaagtcggagcaacacctcacgccgccgcaaactacctgcaagtcgcactcgccgtcgccgccgccgcaccactgccagcaaattaactcccgccgccctggtgcggagagtgtaccgcgatggtcgcgctgaacctctgacgctgccgcgcgcgcgctatcatccaagcatcaccacttaatgactgttgacgctgcctccttgcagatatggctctcacttgccgccttcgcgtccccattactggctaccgaggaagaaactcgcgccgtagaaggatgttggggcgagggatgcgccgccacagacgaaggcgcgctatcagcaagcgattagggggtggctttctgccagctcttatacccatcatcgccgcggcgatcggggcgataccaggcatagcttccgtggcggttcaggcctcgcagcgccactaacaatggaaaaatttataaataaaaaatagaatggactctgacgctcctggtcctgtgactatgtttttgtagagatggaagacatcaatttttcatccctggctccgcgacacggcacgaggccgtacatgggcacctggagcgacatcggcacgagccaactgaacgggggcgccttcaattggagcagtatctggagcgggcttaaaaattttggctcgaccataaaaacctatgggaacaaagcttggaacagcagcacagggcaggcccttagaaataagcttaaggagcagaacttccaacaaaaggtggtcgatggtatcgcctctggtattaacggcgtagtggatctagccaaccaggctgtgcagaaacagataaacagccgcctggacccgccgcccgcaactcctggtgaaatggaagtggaggaagagcttcctccgctggagaagcggggcgacaagcgaccgcgtcccgagctggaacagacgttggtgacgcgcgcagacgagcccccttcatacgaggaggcagtaaagctcggaatgcccactaccaggcctgtagctcacatggctaccggggtgatgaaaccttctcagtcgcatcggcctgccaccttggacttgcctcctccccctgcttctgcggcgcctattcccaaacctgtcgctaccagaaagcccaccgccgtacagcccgtcgccgtagccagaccgcgtcctggggcacaccgcgcccgaaagcaaactggcagagtactctgaacagcatcgtgggtctgggcgtgcagagtgtaaagcgccgtcgctgctattaattaaatatggagtagcgcttaacttgcttgtctgtgtgtatgtatcatcaccatgccgccgcagcagaggagaaaggaagaggtcgcgcgccgaggctgagttgctttcaagatggccaccccatcgatgatgccccaatgggcatacatgcacatcgccggacaggatgcttcggagtacctgagtccgggtctggtgcagttcgcccgtgcaacagacacctacttcagtatggggaacaagtttagaaaccccacagtggcgcccacccacgatgtgaccaccgaccgtagccagcgactaatgctgcgcttcgtgcccgttgaccgggaagacaatacctactcttacaaagttcgctacacgctggctgtaggggacaacagagtactggatatggccagcacgttctttgacatccgcggcgtgctggaccggggccctagcttcaaaccctactccgggaccgcctacaacagcctggctcccaagggagcgcccaacacctgccagtggaaggattctgacagcaaaatgcatacctttggggtagctgccatgcccggtgttactgggaaaaagatagaagctgatgggctgcctattggaatagattcaacttctggaactgacacagtaatttatgctgataaaactttccaaccagaaccacaagttggaaatgccagttgggttgacgccaatggtacagaggaaaaatatggaggcagagctctgaaggacactacaaagatgaaaccctgctatggttctttcgccaagcctaccaacaaagaaggtggtcaggctaacttaaaagattcagaaaccgccgccaccactcctaactatgatatagatctggctttctttgacaacaaaaatattgctgctaactacgatccagatattgtaatgtacacagaaaatgttgacttgcagactccagatactcatattgtatacaaacctggaacagaggacaccagctctgaatccaatttgggtcagcaagccatgcctaacagacccaactacattggcttcagagacaattttattgggctcatgtactacaacagcactggcaatatgggggtgctggccggtcaggcctctcagctgaatgctgtggttgacttgcaagacagaaacactgaactgtcctaccagctcttgcttgactctctgggtgacagaacccggtatttcagtatgtggaatcaggcggtggacagctatgatcctgatgtgcgtattattgaaaaccatggtgtggaggacgaattgccaaactattgctttccgttgaatggtgtgggatttacagacacttaccaaggtgttaaagttaaaacagatgcagttgctggaaccagtggaacacagtgggacaaagatgacaccacagttagtactgctaatgaaatccatggaggcaatccttttgccatggaaatcaacatccaagccaatctatggcgaagtttcctttattccaatgtggctttgtatctcccagactcgtataaatacaccccgtccaatgtcactctcccagaaaacaaaaacacctacgactacatgaacgggcgggtggtgccgccatctctagtagacacctatgtgaacattggtgccaggtggtctctggatgccatggacaatgtcaacccattcaaccaccaccgtaacgctggcttgcgttaccgatccatgcttctgggtaacggacgttatgtgcctttccacatacaagtgcctcaaaaattcttcgctgttaaaaacctgctgcttctcccaggctcctacacttatgagtggaactttaggaaggatgtaaacatggttctacagagttcccttggtaacgacctacgggtagatggcgccagcatcagtttcacgagcatcaatctttatgctacttttttccccatggctcacaacaccgcttccacccttgaagccatgctgcggaatgacaccaatgatcagtcattcaacgactacctatctgcagctaacatgctctaccccatacctgccaacgcaaccaatattcccatttccattccttctcgcaactgggcggctttcagaggctggtcatttaccagactgaaaaccaaagaaactccctctttggggtctggatttgacccatactttgtctattccggttctattccctacctggatggtaccttctatctaaatcacacttttaagaaggtttccatcatgtttgactcttcagtgagctggcctggaaatgacaggttactatctcctaacgaatttgaaataaagcgcactgtggatggcgaaggctacaacgtagcccaatgcaacatgaccaaagactggttcttggtacagatgctcgccaactacaacattggctaccagggcttttacatccctgagggatacaaggatcgcatgtactcctttttcagaaacttccagcctatgagcaggcaggtggttgatgaggttaattacactgactacaaagccgtcaccttaccatatcaacacaacaactctggctttgtaggataccttgcgcctactatgagacaaggggaaccttacccagccaattatccatacccgctcatcggaactactgccgttaagagtgttacccaaaaaaagttcctgtgcgacaggaccatgtggcgcataccgttctccagcaacttcatgtccatgggggcccttacagacctgggacaaaacctgctctatgccaactcggcccatgcactggacatgacttttgaggtggatcccatggatgagcccaccctgctttatcttcttttcgaagtcttcgacgtggtcagagtgcaccagccacaccgcggcgtcatcgaggccgtctacctgcgcacaccgttctcggccggcaacgccaccacataagaagcctcttgcttcttgcaagcagcagctgcagccatgtcatgcgggtccggaaacggctccagcgagcaagagctcaaagccatcgtccgagacctgggttgcggtccctatttcctgggaacctttgacaagcgtttcccggggttcatggcccccgacaagctcgcctgcgccatagtcaacactgccggacgcgagacggggggagagcactggctggcttttggttggaacccgcgctccaacacctgctacctttttgatccttttgggttctcggatgagcgactcaaacagatttaccagtttgagtacgaggggctcctgcgccgcagtgcccttgctaccaaagaccgctgcatcaccctggaaaagtccacccagagcgtgcagggcccacgctcagccgcctgtggacttttttgctgtatgttccttcatgcctttgtgcactggcccgaccgtcccatgaacggaaaccccaccatgaagttgctgactggggtgcccaacagcatgctccaatctccccaagtccagcccaccctgcgccgcaaccaggaggcactataccgcttcctaaacacccactcatcttactttcgttctcaccgcgcacgcatcgaaagggccaccgcgtttgaccgtatggatatgcaataagtcatgtaaaaccgtgttcaataaaaagcactttatttttacatgcactaaggctctggttttttgctcattcgttttcatcattcactcagaaatcaaatgggttctggcgggagtcatagtggcccgcgggcagggatacgttgcggaactgtaacctgttctgccacttgaactcggggatcaccagcttgggaactggaatctcgggaaaggtgtcttgccacaactttctggtcagttgcagggcgccaagcaggtcaggagcagagatcttgaaatcacagttggggccggcattctggacacgggagttgcggtacactgggttgcaacactggaacaccatcaaggctgggtgtctcacgcttgccagcacggtcgggtcactgatggtagtcacatccaagtcttcagcattggccatcccaaagggggtcatcttacaggtctgcctgcccatcacgggagcgcagcctggcttgtggttgcaatcgcaatgaatgggaatcagcatcatcctggcttggtcgggggttatccctggatatacggccttcatgaaggcttcgtactgcttgaaagcttcctgagccttacttccctcggtgtagaacattccacaggacttgctggaaaattggttagtagcacagttggcatcatttacacagcagcgggcatcgttgttggccaactgaaccacatttctgccccagcggttctgggtgatcttggctctgtctgggttctccttcatagcgcgctgcccgttctcgctcgccacatccatctcgataatgtggtccttctggatcatgatagtgccatgcaggcatttcaccttgccttcgtaatcggtgcatccatgagcccacagagcgcacccggtgcactcccaattattgtgggcgatctcagaataagaatgcaccaatccctgcatgaatcttcccatcatcgctgtcagggtcttcatgctactaaatgtcagcggaatgccacggtgctcctcgttcacatactggtggcagatacgcttgtactgctcgtgctgctctggcatcagcttgaaagaggttctcaggtcattatccagcctatacctctccattagcacagccatcacttccatgcccttctcccaggcagataccaggggcaagctcaaaggattcctaacagcaatagaagtagctcctttagctatagggtcattcttgtcgatcttctcaacacttctcttgccatccttctcaatgatgcgcaccggggggtagctgaagcccacggccaccaactgagcctgttctctttcttcttcgctgtcctggctgatgtcttgcagagggacatgcttggtcttcctgggcttcttcttgggagggatcgggggaggactgttgctccgttccggagacagggatgaccgcgaagtttcgcttaccagtaccacctggctctcgatagaagaatcggaccccacgcgacggtaggtgttcctcttcgggggcagaggtggaggcgactgagatgggctgcggtctggccttggaggcggatggctggcagagcccattccgcgttcgggggtgtgctcccgttggcggtcgcttgactgatttcctccgcggctggccattgtgttctcctaggcagagaaacaacagacatggaaactcagccatcactgccaacatcgctgcaagcgccatcacacctcgcccccagcagcgacgaggaggagagcttaaccaccccaccacccagtcccgctaccaccacctctaccctcgatgatgaggaggaggtcgacgcagcccaggagatgcaggcgcaggataatgtgaaagcggaagagattgaggcagatgtcgagcaggacccgggctatgtgacaccggcggagcacgaggaggagctgaaacgttttctagacagagaggatgacgaccgcccagagcatcaagcagatggcgatcaccaggaggctggcctcggggatcatgttgccgactacctctccgggcgtgggggggaggacgtgctcctcaaacatctagcaaggcagtcgctcatagttaaagacgcactactcaacctcaccgaagtgcccatcagtgtggaagagcttagccgcgcctacgagctgaacctcttttcgcctcagataccccccaagcggcagccaaacggcacctgcgaggccaaccctcgactcaacttctatccagcttttactgtccccgaagtgctggccacctaccacatcttttttaagaaccaaaagattccagtctcctgccgcgccaaccgcacccgcgcagatgcccttctcaacttgggtccgggagctcgcttacctgatatagcttccttggaagaggttccaaagatctttgagggtctgggaagtgatgagactcgggccgcaaatgctctgcaacagggagagaatggcatggatgaacatcacagcgctctagtggaactggagggtgacaatgcccggcttgcagtgctcaagcgcagtatcgtggtcacccattttgcctaccccgctgttaacctgccgcccaaagtcatgagcgctgtcatggaccatctgctcatcaaacgagcaagtccactttcagaaaaccagaacatgcaggatccagacgcctcggacgagggcaagccggtagtcagtgacgagcagctatctcgctggctgggtaccaactccccccgagatttggaagaaagacgcaagcttatgatggctgtagtgctagtaactgttgagttggagtgtctgcgccgcttttttaccgaccccgagaccctgcgcaagctagaggagaacctgcactacaccttcagacatggcttcgtgcggcaggcatgcaagatctccaacgtggagctcaccaacctggtttcatacatgggcattttgcatgagaaccggctagggcagagcgttctgcacaccaccctgaagggggaggcccgccgcgactacatccgagactgtgtctacctctacctctgccatacctggcagactggtatgggtgtgtggcaacagtgtttggaagagcagaaccttaaagagctggacaagctcttgcagagatccctcaaagccctgtggacaggttttgacgagcgcaccgtcgcctcggacttggcggacatcatcttccccgagcgtcttacggttactctgcgaaacggcctgccagacttcatgagccagagcatgcttaacaactttcgctctttcatcctggaacgctccggtatcctgcctgccacctgctgtgcgctgccctccgactttgtgcctctcacctaccgcgagtgcccaccgccgctatggagccactgctacctattccgcctggccaactacctctcctaccactcggatgtgatagaggatgtgagcggagacggcctgctggaatgccactgccgatgcaatttatgcacaccccaccgctccctcgcctgcaacccccagttgctaagcgagacccagatcatcggcaccttcgagttgcagggtcccaacagtgaaggcgaggggtcttctccggggcagagtctgaaactgacaccggggctgtggacctccgcctacctgcgcaagtttcatcccgaggactatcatccctatgagatcaggttctatgaggaccagtcacatcctcccaaagtcgagctctcagcctgcgtcatcacccagggggcaattctggcccaattgcaagccatccaaaaatcccgccaagaatttctgctgaaaaagggaagcggggtctaccttgacccccagaccggtgaggagctcaacacaaggttcccccaggatgtcccatcgccgaggaagcaagaagctgaaggtgcagctgtcacccccagaggatatggaggaagactgggacagtcaggcagaggaggagatggaagattgggacagccaggcagaggaggtggacagcctggaggaagacagtttggaggaggaagacgaggaggcagaggaggtggaagaagcaaccgccgccaaacagttgtcatcggcggcggagacaagcaagtccccagacagcagcacggctaccatctccgctccgggtcggggggcccagcggcggcccaacagtagatgggacgagaccgggcgattcccaaacccgaccaccgcttccaagaccggtaagaaggagcgacagggatacaagtcctggcgtggacataaaaacgctatcatctcctgcttgcatgaatgcgggggcaacatatccttcacccggcgatacctgcttttccaccacggtgtgaacttcccccgcaatatcttgcattactaccgtcacctccacagcccctactgcagtcagcaagtcccggcaaccccgacagaaaaagacagcagcgacaacggtgaccagaaaaccagcagttagaaaatccacaacaagtgcagcaggaggaggactgaggatcacagcgaacgagccagcgcagaccagagagctgaggaaccggatctttccaaccctctatgccatcttccagcagagtcgggggcaagagcaggaattaaaagtaaaaaaccgatctctgcgctcgctcaccagaagttgtttgtatcacaagagcgaagaccaacttcagcgcactctcgaggacgccgaggctctcttcaacaagtactgcgcgctgactcttaaagagtagcccttgcccgcgctcattcgaaaacggcgggaatcacgtcacccttggcagctgtcctttgccctcgtcatgagtaaagagattcccacgccttacatgtggagctatcagccccaaatggggttggcagcaggtgcttcccaggactactccacccgcatgaattggcttagcgccgggccctcaatgatatcacgggttaatgatatacgagcttatcgaaaccagttactcctagaacagtcagctctcaccaccacaccccgccaacaccttaatccccgaaattggcccgccgccctggtgtaccaggaaaatcccgctcccaccaccgtactacttcctcgagacgcccaggccgaagttcagatgactaacgcaggtgtacagctggcgggcggttccgccctatgtcgtcaccgacctcaacagagtataaaacgcctggtgatcagaggccgaggtatccagctcaacgacgagtcggttagctcttcgcttggtctgcgaccagacggagtcttccagatcgccggctgtgggagatcttccttcactcctcgtcaggctgtgctgactttggagagttcgtcctcgcagccccgctcgggcggcatcggaactctccagtttgtggaggagtttactccctctgtctacttcaaccccttctccggctctcctggccagtacccggacgagttcataccgaacttcgacgcaatcagcgagtcagtggatggctatgattgatgtctaatggtggcgcggctgagctagctcgactgcgacacctagaccactgccgccgctttcgctgtttcgcccgggaactcaccgagttcatctacttcgaactctccgaggagcaccctcagggtccggcccacggagtgcggattaccatcgaagggggaatagactctcgcctgcatcgcatcttctcccagcggcccgtgctgattgagcgcgaccagggaaatacaaccatctccatctactgcatttgtaaccaccccggattgcatgaaagcctttgctgtcttgtttgtgctgagtttaataaaaactgagttaagaccctcctacggactaccgcttcttcaatcaggactttacaacaccaaccagatcttccagaagacccagacccttcctcctctgatccaggactctaactctaccttaccagcaccctccactactaaccttcccgaaactaacaagcttggatctcatctgcaacaccgcctttcacgaagccttctttctgccaatactaccactcccaaaaccggaggtgagctccgcggtcttcctactgacgacccctgggtggtagcgggttttgtaacgttaggagtagttgcgggtgggcttgtgctaatcctttgctacctatacacaccttgctgtgcatatttagtcatattgtgctgttggtttaagaaatgggggccatactagtcgtgcttgctttactttcgcttttgggtctgggctctgctaatctcaatcctcttgatcacgatccatgtctagacttcgacccagaaaactgcacacttacttttgcacccgacacaagccgtctctgtggagttcttattaagtgcggatgggactgcaggtccgttgaaattacacataataacaaaacatggaacaataccttatccaccacatgggagccaggagttcccgagtggtatactgtctctgtccgaggtcctgacggttccattcgcattagtaacaacactttcattttttctgaaatgtgcgatctggccatgtttatgagcaaacagtatgacctatggcctcctagcaaagagaacattgtggcattttccattgcttattgcttggtaacatgcatcatcactgctatcatttgtgtgtgcatacacttgcttatagttattcgccctagacaaagcaatgaggaaaaagagaaaatgccttaacctttttcctcataccttttctttacagcatggcttctgttacagctctaattattgccagcattgtcactgtcgctcacgggcaaacaattgtccatattaccttaggacataatcacactcttgtagggcccccaattacttcagaggttatttggaccaaacttggaagtgttgattattttgatataatttgcaacaaaactaaaccaatatttgtaatctgcaacagacaaaatctcacgttaattaatgtcagcaaaatttataacggttactattatggttatgatagatccagtagtcaatataaaaattacttagttcgcataactcaacccaaatcaacagtgccaactatgacaataattaaaatggctaataaagcattagaaaattttacattaccaacaacgcccaatgaaaaaaacattccaaattcaatgattgcaattattgcggcggtggcattgggaatggcactaataataatatgcatgttcctatatgcttgttgctataaaaagtttaaacataaacaggatccactactaaattttaacatttaattttttatacagatgatttccactacaatttttatcattactagccttgcagctgtaacttatggccgttcacacctaactgtacctgttggctcaacatgtacactacaaggaccccaagaaggccatgtcacttggtggagaatatatgataatggagggttcgctagaccatgtgatcagcctggtacaaaattttcatgcaacggaagagacttgaccattattaacataacattaaatgagcaaggcttctattatggaaccaactataaaaatagtttagattacaacattattgtagtgccagccaccacttctgctccccgcaaatccactttctctagcagcagtgccaaagcaagcacaattcctaaaacagcttctgctatgttaaagcttcgaaaaatcgctttaagtaattccacagccgctcccaatacaattcctaaatcaacaattggcatcattactgccgtggtagtgggattaataattatatttttgtgcataatgtactacgcctgctgctatagaaaacatgaacaaaaaggtgatgcattactaaattttgatatttaattttttatagaattatgatattgtttcaatcaaataccactaacactatcaatgtgcagactactttaaatcatgacatggaaaaccacactacctcctatgcatacacaaacattcagcctaaatacgctatgcaactaagaaatcaccatactaattgtaattggaattcttatactatctgttattctttattttatattctgccgtcaaatacccaatgttcatagaaattctaaaagacgacccatctattctcctatgattagtcgtccccatatggctctgaatgaaatctaagatctttttttttctcttacagtatggtgaacatcaatcatgattcctagaaatttcttcttcaccatactcatctgtgctttcaatgtctgtgctactttcacagcagtagccactgcaagcccagactgtataggaccatttgcttcctatgcactttttgccttcgttacttgcatctgcgtgtgtagcatagtctgcctggttattaattttttccaactggtagactggatctttgtgcgaattgcctacctacgtcaccatcccgaataccgcaatcaaaatgttgcggcactttttaggcttatttaaaaccatgcaggctatgctgccagtcattttaattctgctcctaccctgcattgccctagcttccaccgccactcgcgctacacctgaacaacttagaaaatgcaaatttcaacaaccatggtcatttcttgattgctaccatgaaaaatctgattttcccacatactggatagtgattgttggaataattaacatactttcatgtacctttttctcaatcacaatataccccacatttaattttgggtggaattctcccaatgcactgggttacccacaagaaccacatgaacatatcccactacaacacatacaacaaccactagcactggtagagtatgaaaatgagccacaaccttcactgcctcctgccattagttacttcaacctaaccggcggagatgactgaaatactcaccacctccaattccgccgaggatctgcttgatatggacggccgcgcctcagaacagcgactcgcccaactacgcatacgccagcagcaggaacgtgccgccaaggagctcagggatgctattgaaattcaccaatgcaaaaaaggcatattttgtttggtaaaacaagccaagatatcctacgagattaccaatactgaccatcgcctctcatacgagctcggaccgcagcgacaaaaattcacttgtatggtgggaatcaaccccataatcatcacccagcaagctggagataccaagggttgcatccactgttcctgcagttccgccgagtgcatctacaccctgctgaagaccctctgcggccttcgagacctcctacccatgaactaatcaacccagcccctcacttaccaattacataaagccaattaataaaaacacttacttgaaatcagaaataaggtttctgtctacgttgtttccaagcagcacctcacttccttcttcccaactctggtactctaagcctcggcgggtggcatacttcctccacactttgaaagggatgtcaaattttagttcctcttctttgcccacaatcttcatttctttatccccagatggccaaacgagctcggctaagcagctccttcaatccggtctacccctatgaagatgaaagcagctcacaacacccctttataaaccctggtttcatttcctcaaatggttttgcacaaagcccagatggagttctaactcttaaatgtgttaatccactcactaccgccagcggacccctccaacttaaagttggaagcagtcttacagtagatactatcgatgggtctttggaggaaaatataactgccgcagcgccactcactaaaactaaccactccataggtttattaataggatctggcttgcaaacaaaggatgataaactttgtttatcgctgggagatgggttggtaacaaaggatgataaactatgtttatcgctgggagatgggttaataacaaaaaatgatgtactatgtgccaaactaggacatggccttgtgtttgactcttccaatgctatcaccatagaaaacaacaccttgtggacaggcgcaaaaccaagcgccaactgtgtaattaaagagggagaagattccccagactgtaagctcactttagttctagtgaagaatggaggactgataaatggatacataacattaatgggagcctcagaatatactaacaccttgtttaaaaacaatcaagttacaatcgatgtaaacctcgcatttgataatactggccaaattattacttacctatcatcccttaaaagtaacctgaactttaaagacaaccaaaacatggctactggaaccataaccagtgccaaaggcttcatgcccagcaccaccgcctatccatttataacatacgccactgagaccctaaatgaagattacatttatggagagtgttactacaaatctaccaatggaactctctttccactaaaagttactgtcacactaaacagacgtatgttagcttctggaatggcctatgctatgaatttttcatggtctctaaatgcagaggaagccccggaaactaccgaagtcactctcattacctcccccttctttttttcttatatcagagaagatgactgacaacaaaaaaaataaagatcaacttttttattgaaaatcagtttacaagattcgagtagttattttgcccccctcttcccattttatagaatacacaattctctccccacgcacagctttgaacatttgaattccattagagatagacatagttttagattccacattccacacagtttcagagcgggccaatcttggatcagtgatagatataaatccatcggaacagtctttcaaggtggtttcacagtccaactgctgcggctgcggctccggggtttggattagggtcatctggaagaagaacgatgggagtcataatccgagaacgggatcgggcggttgtgtcttaaacctcgaagcaatcgctgtctgcgccgctccgtgcgactgctgctgatgggatcaggatccacagtctctcgaagcataattttaatagccctcaacattaacatcctggtgcgatgggcacaacaacgcattctaatttcgcttagctcactgcagtaggtacaacacattaccacaatgttgtttaacaggccataattaaaggtgctccagccaaaactcatctcagggataatcatacccgcgtgaccatcgtaccaaatcttaatgtaaattagatgacgccccctccagaacacactgcccacatacataatttccttgggcatatgcatgttcacaatttctctgtaccatggacagcgctggttaatcatacagcccctaataaccttccggaaccacatagctagcactgctcccccagcaatacattgaagagaacccggctgtttacagtgacaatggagaacccacttctctcgcccatggatcacttgagaattaaatatatctatagtggcacaacacaaacataaatgcatgcatcttttcataaccctcaactcttcgggggttaaaaacatatcccagggaataggaagctcttgcaaaacagtaaagctggcagaacaaggaagaccacgaacacaacttacactatgcatagtcatagtatcacaatctggcaacagcgggtggtcttcagtcatagaagctcgggtttcattttcctcacatcgtggtaactgggctctggtgtaagggtgatgtctggcgcatgatgtcgagcgtgcgcgcaaccttgtcataatggagttgcttcctgacattctcgtattttgtatagcaaaatgcggccctggcacaacacacttttcttcgtcttctatcctgccgcttagtgtgttccgtctgataattcaagtacagccacactcttaagttggtcaaaagaatgctggcttcagttgtaatcaaaactccatcatatttaattgttctaaggaaatcatccacggtagcatatgcaaatcccaaccaagcaatgcaactggattgcgtttcaagcagcagaggagagggaagagacggaagaatcatgttaatttttattccaaacgatctcgcagtacttcaaattgtagatcgcgcagatggcatctatcgcccccactgtgttggtgaaaaagcacagctaaatcaaaagaaatgcgattttcaaggtgctcaacggtggcttccaacaaagcctccacgcgcacatccaaaaacaaaagaataccaaaagaaggagcattttctaactcctcaaacatcatattacattcctgcaccattcccagataattttcagctttccagccttgaattattcgtgtcagttcttgtggtaaatccaaaccacacattacaaacaggtcccggagggcgccctccaccaccattcttaaacacaccctcataatgacaaaatatcttgctcctgtgtcacctgtagcaaattaagaatggcatcatcaattgacatgcccttggctctaagttcttctctaagttctagttgtaaatactctctcatattatcaccaaactgcttagccagaagccccccgggaacaatagcaggggacgctacagtgcagtacaagcgcagacctccccaattggctccagcaaaaacaagattagaataagcatactgggaaccaccagtaatatcatcaaagttgctggaaatataatcaggcagagtttcttgtaaaaattgaataaaagaaaaattttccaaagaaacattcaaaacctctgggatgcaaatgcaataggttaccgcgctgcgctccaacattgttagttttgaattagtctgtaaaataaaagaaacaagcgtcatatcatagtagcctgtcgaacaggtggataaatcagtctttccatcacaagacaagccacagggtctccagcttgaccctcgtaaaacctgtcatcgtgattaaacaacagcaccgaaagttcctcgcggtggccagcatgaataattcttgatgaagcatataatccagacatgttagcatcagttaaagagaaaaaacagccaacatagcctctgggtataattatgcttaatcttaagtatagcaaagccacccctcgcggatacaaagtaaaaggcacaggagaataaaaaatataattatttctctgctgctgttcaggcaacgtcgcccccggtccctctaaatacacatacaaagcctcatcagccatggcttaccagacaaagtacagcgggcgcacaaagcacaagctctaaagaagctctaaagacactctccaacctctccacaatatatacacaagccctaaactgacgtaatgggagtaaagtgtaaaaaatcccgccaagcccaacacacaccccgaaactgcgtcagcagggaaaagtacagtttcacttccgcaaacccaacaagcgtaacttcctctttctcacggtacgtcacatccgattaacttgcaacgtcattttcccacggccgcaccgccccttttagccgttcaccccgcagccaatcaccacacagcgcgcacttttttaaattacctcatttacatgttggcaccattccatctataaggtatattattgataatg

SEQ ID NO: 204 - DNA, 35382 bp, Unknown
  Description of Unknown: Human adenovirus 21 sequence
ctatctatataatataccttatagatggaatggtgccaatatgcaaatgaggtaatttaaaaaagtgcgcgctgtgtggtgattggctgcggggtgaacggctaaaaggggcgggcaatgctgggaggtgacgtaacttatgtaggaggagttatgttgcaagttatcgcggtaaaggtgacgtaaaacgaggtgtggtttggacacggaagtagacagttttcccacgcttactgacaggatatgaggtagttttgggcggatgcaagtgaaaattctccattttcgcgcgaaaactgaatgaggaagtgaatttctgagtcatttcgcggttatgacagggtggagtatttgccgagggccgagtagactttgaccgtttacgtggaggtttcgattaccgtgtttttcacctaaatttccgcgtacggtgtcaaagtcctgtgtttttacgtaggtgtcagctgatcactagggtatttaaacctgtcgagttccgtcaagaggccactcttgagtgccagcgagaagagttttctcctccgcgctgcgagtcagttttgcgctttgaaaatgagacacctgcgattcctgccacaggagattatctccagcgagaccgggatcgaaatactggagtttgtggtaaataccctgatgggagatgacccggaaccgccagtgcagcctttcgatccacctacgctgcacgatctgtatgatttagaggtagacgggcctgatgatcccaatgaggaagctgtaaatgggttttttactgattctatgctgctagctgccgatgaaggattggacataaaccctcctcctgggacccttgataccccaggggtggttgtggaaagcggcagaggtgggaaaaaattgcctgatctgggagcagctgaaatggacttgcgttgttatgaagagggttttcctccgagtgatgatgaagatggggaaactgaacagtccatccataccgcagtgaatgagggagtaaaagctgccagcgatgtttttaagttggactgtccggagctgcctggacatggctgtaagtcttgtgaatttcacaggaataacactggaatgaaagaactattgtgctcgctttgctatatgagaatgcactgccactttatttacagtaagtgtatttaagtgaaatttaaaggaatagtgtagctgtttaataactgttgaatggtagatttatgtttttacttgcgattttttgtaggtcctgtgtctgatgatgaggcgccttctcctgattcaactacctcacctcctgaaattcaggcgcccgtacctgcaaacgtatgcaagcccattcctgtgaagcctaagtgtgggaaacgccctgctgtggataagcttgaggacttgttggagggtggggatggacctttggaccttagtacccggaaactgccaagacaatgagtgccctgcagctgtgtttatttaatgtgacgtcatgtaataaaattatgtcagctgctgagtgttttattgcttcttgggtggggacttggatatataagtaggagcagatctgtgtggttagctcatagcaacctgctgccatccatggaggtttgggctatcttggaagacctgagacagactaggctactgctagaaaacgcctcggacggagtctctggcttttggagattctggttcggtggtgatctagctaggctagtgtttaggataaaacaggactacagggaagaatttgaaaagttattggacgacagtccaggactttttgaagctcttaacttgggccaccaggctcattttaaggagaaggttttatcagttttagatttttctactcctggtagaactgctgctgctgtagcttttcttacttttatattggataaatggatccgccaaacccacttcagcaagggatacgttttggatttcatagcagcagctttgtggagaacatggaaggctcgcaggatgaggacaatcttagattactggccagtgcagcctctgggagtagcagggatactgagacacccaccggccatgccagcggttctggaggaggagcagcaggaggacaatccgagagccggcctggaccctccggtggaggagtagctgacctgtttcctgaactgcgacgggtgcttactaggtctacgtccagtggacaggacaggggcattaagagggagaggaatcctagtgggaataattcaagaaccgagttggctttaagtttaatgagccgtaggcgtcctgaaactgtttggtggcatgaggttcagagcgaaggcagggatgaagtttcaatattgcaggagaaatattcactagaacaacttaagacctgttggttggaacctgaggatgattgggaggtggccattaggaattatgctaagatatctctgaggcctgataaacagtatagaattactaagaagattaatattagaaatgcatgctacatatcagggaatggggcagaggttataatagatacccaagataaagcagcttttagatgttgtatgatgggtatgtggccaggggttgtcggcatggaagcagtaacatttatgaatattaggtttaaaggggatgggtataatggcattgtatttatggctaacactaagctgattctacatggttgtagcttttttgggtttaataatacttgtgtagaagcttgggggcaagttggtgtgaggggttgtagtttttatgcatgctggattgcaacatcaggtagggtcaagagtcagttgtctgtgaagaaatgcatgtttgagagatgtaatcttggcatactgaatgaaggtgaagcaagggtccgccactgcgcagctacagaaactggctgcttcattctaataaagggaaatgccagtgtgaagcataatatgatctgtggacattcgaatgagaggccttatcagatgctgacctgcgctggtggacattgcaatattcttgctaccgtgcatatcgtttcccatgcacgcaagaaatggcctgtatttgaacataatgtgattaccaagtgcaccatgcacataggtggtcgcaggggaatgtttatgccttaccagtgtaacatgaatcatgtgaaggtgatgttggaaccagatgccttttccagagtgagcttaacaggaatctttgatatgaatattcaactatggaagatcctgagatatgatgacactaaaccgagggtgcgcgcatgcgaatgcggaggcaagcatgctagattccagccggtgtgcgtggatgtgactgaagacctgagacccgatcatttggtgcttgcctgcactggagcggagttcggttctagtggtgaagaaactgactaaagtgagtagtggggcaatatgtggatggggactttcaggttggtaaggtggacagattgggtaaattttgttaatttctgtcttgcagctgccatgagtggaagcgcttcttttgaggggggagtatttagcccttatctgacgggcaggctcccatcatgggcaggagttcgtcagaatgtcatgggatccactgtggatgggagacccgtccagcccgccaattcctcaacgctgacctatgccactttgagttcgtcatcattggatgcagctgcagccgccgccgctactgctgccgccaacaccatccttggaatgggctattacggaagcatcgttgccaattccagttcctctaataacccttcaaccctggctgaggacaagctgcttgttctcttggctcagctcgaggccttaacccaacgcttaggcgaactgtctaagcaggtggcccagttgcgtgagcaaactgagtctgctgttgccacagcaaagtctaaataaagatctcaaatcaataaataaagaaatacttgttataaaaacaaatgaatgtttatttgatttttcgcgcgcggtatgccctggaccatcggtctcgatcattgagaactcggtggatcttttccagtaccctgtaaaggtgggattgaatgtttagatacatgggcattagtccgtctcgggggtggagatagctccattgaagagcctcttgctccggggtagtgttataaatcacccagtcatagcaaggtcggagtgcatggtgttgcacaatatcttttaggagcagactaattgcaacggggaggcccttagtgtaggtgtttacaaatctgttgagctgggacgggtgcatcctgggtgaaattatatgcattttggactggatcttgaggttggcaatgttgccgcctagatcccgtctcggattcatattgtgcagaaccaccaagacagtgtatccggtgcacttgggaaatttatcatgcagcttagagggaaaagcatgaaaaaatttggagacgcctttgtgaccccccagattctccatgcactcatccataatgatagcgatggggccgtgggcagcggcacgggcgaacacgttccgggggtctgaaacatcatagttatgctcctgagtcaggtcatcataagccattttaataaactttgggcggagggtgccagattgggggatgaaagttccctctggcccgggagcatagtttccctcacatatttgcatttcccaggctttcagttccgagggggggatcatgtccacctgcggggctataaaaaataccgtttctggagccggggtgattaactgggatgagagcaaattcctaagcagctgagacttgccgcacccagtgggaccgtaaatgaccccaattacgggttgcagatggtagtttagggagcgacagctgccgtcctcccggagcaggggggccacttcgttcatcatttcccttacatggatattttcccgcaccaagtccgttaggaggcgctctcccccaagggatagaagctcctggagcgaggagaagtttttcagcggcttcagcccgtcagccatgggcattttggaaagagtctgttgcaagagctcgagccggtcccagagctcggtgatgtgctctatggcatctcgatccaacagacctcctcgtttcgcgggttgggacggctcctggagtagggaatcagacgatgggcgtccagcgctgctagggtccgatccttccatggtcgcagcgtccgagtcagggttgtttccgtcacggtgaaggggtgcgcgcctggttgggcgcttgcgagggtgcgcttcagactcatcctgctggtcgagaaccgctgccgatcggcgccctgcaggtcggccaggtagcagtttaccatgagttcgtagttgagcgcctcggccgcgtggcctttggcacggagcttacctttggaagttttatggcaggcggggcagtagatacatttgagggcatacagcttgggcgcgaggaaaatggattcgggggagtatgcatccgcaccgcaggaggcgcagacggtttcgcactccacgagccaggtcagatccggctcatcggggtcaaaaacaagttttccgccatgttttttgatgcgtttcttacctttggtttccatgagttcgtgtccccgctgggtgacaaagaggctgtccgtgtccccgtagaccgactttatgggcctgtcctcgagcggagtgcctcggtcctcttcgtagaggaacccagcccactctgatacaaaagcgcgtgtccaggccagcacaaaggaggccacgtgggaggggtagcggtcgttgtcaaccagtgggtccaccttctctacggtatgtaaacacatgtccccctcctccacatccaagaatgtgattggcttgtaagtgtaggccacgtgaccaggggtccccgccgggggggtataaaagggggcgggcctctgttcgtcctcactgtcttcaggatcgctgtccaggagcgccagctgttggggtaggtattccctctcgaaggcgggcatgacctctgcactcaggttgtcagtttctaggaacgaggaggatttgatattgacagtaccagcagagacgcctttcataagactctcgtccatctggtcagaaaacacaatcttcttgttgtccagcttggtggcaaatgatccataaagggcattggacagaagcttggcgatggagcgcatggtttggttcttttccttgtccgcgcgctccttggcggcgatgttaagctggacgtactcgcgcgccacacatttccattcagggaagatggttgtcagttcatccggaactattctgactcgccatcccctattgtgcagggttatcagatccacactggtggccacctcgcctcggaggggctcattggtccagcagagtcgacctccttttcttgaacagaaaggtgggagggggtctagcatgaactcatcaggggggtccgcatctatggtaaatattcccggtagcaaatctttgtcaaaatagctgatggtggcgggatcatccaaggtcatctgccattctcgaactgccagcgcgcgctcataggggttaagaggggtgccccagggcatggggtgggtgagcgcggaggcatacatgccacagatatcgtagacatagaggggctcttcgaggatgccgatgtaagtgggataacagcgcccccctctgatgcttgctcgcacatagtcatagagttcatgtgagggggcgagaagacccgggcccagattggtgcggttgggtttttccgccctgtaaacgatctggcgaaagatggcatgggaattggaagagatagtaggtctctggaatatgttaaaatgggcatgaggtaggcctacagagtcccttatgaagtgggcatatgactcttgcagcttggctaccagctcggcggtgacgagtacatccagggcacagtagtcgagagtttcctggatgatgtcataacgcggttggcttttcttttcccacagctcgcggttgagaaggtattcttcgcgatccttccagtactcttcgaggggaaacccgtctttttctgcacggtaagagcccaacatgtagaactgattgactgccttgtagggacagcatcccttctccactggaagagagtatgcttgggctgcattgcgcagcgaggtatgagtgagggcaaaagtgtccctgaccatgactttgaggaattgatacttgaagtcaatgtcatcacaggccccctgttcccagagttggaagtccacccgcttcttgtaggcggggttgggcaaagcgaaagtaacatcattgaagaggatcttgccggccctgggcatgaaatttcgggtgattttgaaaggctgagggacctctgctcggttattgataacctgagcggccaagacgatctcatcaaagccattgatgttgtgccccactatgtacagttctaagaatcgaggggtgcccctgacatgaggcagcttcttgagttcttcaaaagtgagatctgtagggtcagtgagagcatagtgttcgagggcccattcgtgcacgtgagggttcgctttgaggaaggaggaccagaggtccactgccagtgctgtttgtaactggtcccggtactgacgaaaatgctgcccgactgccatcttttctggggtgacgcaatagaaggtttgggggtcctgccgccagcgatcccacttgagtttcatggcgaggtcataggcgatgttgacgagccgctggtctccagagagtttcatgaccagcatgaaggggattagctgcttgccaaaggaccccatccaggtgtaggtttccacatcgtaggtgaggaagagcctttctgtgcgaggatgagagccaatcgggaagaactggatctcctgccaccagttggaggaatggctgttgatgtgatggaagtagaactccctgcgacgcgccgagcattcatgcttgtgcttgtacagacggccgcagtactcgcagcgattcacgggatgcacctcatgaatgagttgtacctgacttcctttgacgagaaatttcagtggaaaattgaggcctggcgtttgtacctcgcgctctactatgttgtctgcatcggcatgaccatcttctgtctcgatggtggtcatgctgacgagccctcgcgggaggcaagtccagacctcggcgcggcaggggcggagctcgaggacgagagcgcgcaggccggagctgtccagggtcctgagacgctgcggagtcaggttagtaggcagtgtcaggagattgacttgcatgatcttttcgagggcgtgagggaggttcagatggtacttgatctccacgggtccgttggtggagatgtcgatggcttgcagggttccgtgccccttgggtgctaccaccgtgcccttgtttttccttttgggcggcggtggctctgttgcttcttgcatgtttagaagcggtgtcgagggcgcgcaccgggcggcaggggcggttcgggacccggcggcatggctggcagtggtacgtcggcgccgcgcgcgggtaggttctggtactgtgctctgagaagactcgcatgcgcgacgacgcggcggttgacatcctggatctgacgcctctgggtgaaagctaccggccccgtgagcttgaacctgaaagagagttcaacagaatcaatctcggtatcgttgacggcggcttgcctaaggatttcttgcacgtcgccagagttgtcctggtaggcgatctcggccatgaactgctcgatctcttcctcttgaagatctccgcggcccgctctctcgacggtggccgccaggtcgttggagatgcgcccaatgagttgagagaatgcattcatgcccgcctcgttccagacgcggctgtagaccacagcccccacgggatctctcgcgcgcatgaccacctgggcgaggttgagctccacgtggcgggtgaagaccgcatagttgcatagacgctggaaaaggtagttgagtgtggtggcgatgtgctcggtgacgaagaaatacatgatccatcgtctcagcggcatctcgctgacatcgcccagcgcttccaagcgctccatggcctcgtagaagtccacggcaaagttgaaaaactgggagttacgcgcggacacggtcaactcctcttccagaagacggatgagttcggcgacggtggtgcgcacctcgcgctcgaaagcccctgggatttcttcctcaatctcttcttcttccactaacatctcttcctcttcaggtggggctgcaggaggagggggaacgcggcgacgccggcggcgcacgggcagacggtcgatgaatctttcaatgacctctccgcggcggcggcgcatggtctcggtgacggcacgaccgttctccctgggtctcagagtgaagacgcctccgcgcatctccctgaagtggtgactgggaggctctccgttgggcagggacaccgcgctgattatgcattttatcaattgccccgtaggtactccgcgcaaggacctgatcgtctcaagatccacgggatctgaaaacctttcgacgaaagcgtctaaccagtcgcaatcgcaaggtaggctgagcactgtttcttgcgggcgggggcggctagacgctcggtcggggttctctctttcttctccttcctcctctttggagggtgagacgatgctgctggtgatgaaattaaaataggcagttttgagacggcggatggtggcgaggagcaccaggtctttgggtccggcttgttggatgcgcaggcgatgggccattccccaagcattatcctgacatctggccagatctttatagtagtcttgcatgagtcgttccacgggcacttcttcttcgcccgctctgccatgcatgcgagtgatcccgaacccgcgcatgggctggacaagtgccaggtccgctacaaccctttctgcgaggatggcttgctgcacctgggtgagggtggcttggaagtcgtcaaagtccacgaagcggtggtaagccccggtgttgattgtgtaggagcagttggccatgactgaccagttgactgtctggtgccccggacgcacaatctcggtgtacttgaggcgcgagtaggcgcgggtgtcaaagatgtaatcgttacaggtgcgcaccaggtactggtagccgataagaaagtgcggcggcggctggcggtataggggccatcgctctgtagccggggcgccaggggcgaggtcttccagcatgaggcggtgataaccgtagatgtacctggacatccaggtgataccggaggcggtggtggatgcccgcgggaactcgcgtacgcggttccagatgttgcgcagcggcatgaagtagttcatggtaggcacggtttggcccgtgagacgtgcacagtcgttgatgctctagacatacgggcaaaaacgaaagcggtcagcggctcgtctccgtggcctggaggctaagcgaacgggttgggctgcgcgtgtaccccggttcgaatctcggatcaggctggagccgcagctaacgtggtactggcactcccgtctcgacccaggcctgcacaaaacctccaggatacggaggcgggtcgtttttttttttttttgctttttcctggatgggagccagtgctgcgtcaagctttagaacactcagttctcggggctgggagtggctcgcgcccgtagtctggagaatcaatcgccagggttgcgttgcggtgtgccccggttcgagtcttagcgcgccggatcggccggtttccgcgacaagcgagggtttggcagccccgtcatttctaagaccccgccagccgacttctccagtttacgggagcgagccctctttttttgtttttttgttgcccagatgcatcccgtgctgcgacagatgcgcccccagcaacagcccccttctcagcagcagctacaacaacagccacaaaaggctcttcctgctcctgtaactactgcggctgcagccgtcagcggcgcggggcagcccgcctatgatctggacttggaagagggcgagggactggcgcgcctgggcgcaccatcgcccgagcggcacccgcgggtgcaactgaaaaaggactctcgcgaggcgtacgtgccccagcagaacctgttcagggacaggagcggcgaggagcctgaggaaatgcgagcttcccgctttaacgcgggtcgcgaactgcgtcacggtctggaccgaagacgggtgctgcgtgatgatgattttgaagtcgatgaagtgacaggaataagtcctgctagggcacatgtggccgcggccaacctagtatcagcttacgagcagaccgtgaaggaggagcgcaactttcaaaaatctttcaacaaccatgtgcgcaccctgattgcccgcgaggaagtgacactgggactgatgcacctgtgggacctgatggaagccattacccagaaccccaccagcaaacctctaaccgctcagctgtttctggtggtgcaacatagtagagacaatgaggcatttagggaggcgctgttgaacattactgagcccgaggggagatggttgtatgatcttatcaatattctgcaaagtataatagtgcaagaacgtagcctgggtctagctgagaaggtggctgctattaactactcggtcttgagcctgggcaagcactacgctcgcaagatctacaaaaccccatacgtacctatagacaaggaggtgaagatagatgggttttatatgcgcatgactctcaaggtgctgaccttgagtgacgatctgggagtgtaccgcaacgacaggatgcaccgcgcagtgagcgccagcagaaggcgtgagctgagcgacagagaacttatgcacagcttgcaaagagctctgactggggctggaaccgagggggagaactactttgacatgggagcggacttgcaatggcagcccagtcgcagggccctggacgcagcagggtatgagcttccttacatagaagaggtggatgaaggccaggatgaggagggcgagtacctggaagactgatggcgcgaccatccatatttttgctagatggaacagcaggcaccggaccccgcaaaacgggcggcgctacagagccagccgtccggcattaactcctcggacgattggagccaggccatgcaacgcatcatggcgctgacgacccgcaaccccgaagcctttaggcagcaaccccaggccaaccgcctttctgctatcctggaggccgtagtgccctcccgctccaaccccacacacgagaaggtcctggccatcgtgaacgcgctggtggagaacaaagccatacgtcccgatgaggctgggctggtatacaatgccctattggagcgcgtagcccgctacaacagcagcaacgtgcagaccaacctggaccggatggtgaccgatgtgcgcgaggccgtgtctcagcgcgagcggttccagcgagacgccaatttagggtcgctggtggctttgaacgccttcctcagcactcagcctgccaacgtgcctcgcggtcagcaagactacacaaactttctaagtgcattgagactcatggtggccgaagtccctcaaagcgaagtgtaccagtccgggccagactactttttccagaccagcagacagggcttgcagacagtgaacctgagccaggcttttaagaacctgaatggtctgtggggagtgcgcgccccagtgggagatcgggcgaccgtgtctagcttgctgacccccaactcccgcctactactgctcttggtagccccattcactgacagcggtagcatcgaccgtaattcgtacttgggctatctgttgaacctgtatcgcgaggccatagggcaaactcaggtagatgagcaaacctatcaagaaattacccaagtgagccgcgctctgggtcgggaggacactggcagcttggaagccaccttaaacttcttgctgaccaaccggtcgcagaagatccctcctcagtatgcgcttaccgcggaggaggaacggatcctgagatacgtgcagcagagcgtgggactgttcctaatgcaggagggggcgactcctactgctgcgctcgatatgacagcccgaaacatggagcccagcatgtatgccagtaaccggccttttatcaataaactgctagactacttacacagggcggctgctatgaactctgattatttcaccaatgctatcctgaacccccattggctgcccccacctgggttctatacgggcgagtatgacattgcccgacccaatgacgggtttttatgggacgatgtggacagtagtgttttctccccgcctcctggttataacacttggaagaaggaaggtggcgatagaaggcactcttccgtgtcactgtccggggcaacgggtgctgccgcagcggctcccgaggccgcaagtcctttccctagtttgccattttcgctaaacagtgtacgcagcagtgagctgggaagaataacccgtcctcgcttgatcggcgaggaggagtatttgaacgactccctgttgagacccgagagggagaagaatttccccaacaacgggatagaaagcttggttgacaaaatgaaccgctggaagacgtacgcgcacgatccccgggcgctgggggatagccggggcagcgctacccgtaaacgccagtggcacgacaggcagcggggcctggtgtgggccgatgatgattccgccgacgacagcagcgtgttggacttgggtgggagtggtggtaacccgttcgctcacctgcgcccccgcgtcgggcgcctgatgtaagaaaccgaaaataaatactcaccaaggccatggcgaccagcgtgcgttcgtttcttctctgttatatctagtatgatgaggcgaaccgtgctaggcggagcggtggtgtatccggagggtcctcctccttcgtacgagagcgtgatgcagcaggcggcggcggcgacgatgcagccaccactggaggctccctttgtaccccctcggtacctggcacctacggaggggagaaacagcattcgttactcggagctggcaccattgtatgataccacccggttgtatttggtggacaacaagtccgcggacatcgcctcactgaactatcagaacgaccacagcaacttcctcaccacggtggtgcaaaacaatgactttacccccacggaggccagcacccagaccatcaactttgacgagcggtcgcgatggggcggtcagctgaagactatcatgcacaccaacatgcccaacgtgaacgagtacatgtttagcaacaagttcaaagctcgggtgatggtgtctagaaaggctcctgaaggtgtcacagtagatgacaattatgatcacaagcaggatattttggaatatgagtggtttgagtttactctaccggaagggaatttctcagccacaatgaccattgacctaatgaacaatgccatcattgataattaccttgaagtgggcagacagaatggagtgttagagagtgacattggtgttaaatttgacaccaggaactttagactgggttgggatccggaaactaagttgattatgcctggggtttacacctatgaggcattccatcctgacattgtattgttgcctggttgcggagttgactttactgaaagtcgccttagtaacttgcttggtatcaggaaaagacacccattccaggagggttttaagatcttgtatgaggatcttgaagggggtaatatcccggccctgttggatgtagaagcctatgagaacagtaagaaagaacaagaagccaaaacagaagccgctaaagctgctgctattgctaaagccaacatagttgtcagcgaccctgtaagggtggctaatgcagaagaagtcagaggagacaactatacagcttcatctgttgcaactgacgaatcgctattggctgctgtggccgaaactacagagacaaaactcactattaaacctgtagaaaaagacagcaagagtagaagttacaatgtcttggaagataaagtgaatacagcctaccgcagctggtacctgtcctacaactatggtgaccctgaaaaaggagtccgttcctggacactgctcaccacctcggatgtcacctgtggagcagagcaggtgtactggtcgctcccagacatgatgcaggaccctgtcacattccgttccacgagacaagtcagcaactatccagtggtaggtgcagagctcatgccggtcttctcaaagagtttctacaacgagcaagccgtgtactcccagcagcttcgccagtccacctcgctcacgcacgtcttcaaccgcttccctgagaaccagatcctcatccgcccgccagcgcccaccattaccaccgtcagtgaaaacgttcctgctctcacagatcacgggaccctgccgttgcgcagcagtatccggggagtccagcgcgtgaccgttactgacgccagacgccgcacctgcccctacgtctacaaggccctgggcatagtcgcgccgcgcgtcctttcaagccgcactttctaaaaaaaaaaatgtccattcttatctcacctagtaataacaccggttggggcctgcgcgcgccaagcaagatgtacggaggtgctcgcaaacgctctacacagcaccctgtgcgcgtgcgcgggcacttccgcgctccatggggcgccctcaagggtcgtgcccgcactagaaccaccgtcgatgatgtgatcgaccaggtggtggccgatgctcgtaattatactcctactgcacctacatctactgtggatgcagttattgacagcgtagtggctgacgcccgcgcctatgctcgccggaagagcaggcggagacgcatcgccaggcgccaccgggctactcccgctatgcgagcggcaagagctctgctacggagggccaaacgcgtggggcgaagagctatgcttagagcggccagacgcgcggcttcaggtgccagtgccggcaggtcccgcaggcgcgcagccacggcggcagcagcggccattgccaacatggcccaaccgcgaagaggcaatgtgtactgggtgcgcgacgccaccaccggccagcgcgtgcccgtgcgcacccgcccccctcgctcttagaagatactgagcagtctccgatgttgtgtcccagcgaggatgtccaagcgcaaatacaaggaagagatgctccaggtcatcgcgcctgaaatctacggtccgccggtgaaggatgaaaaaaagccccgcaaaatcaagcgggtcaaaaaggacaaaaaggaagaagatggcaatgatggtctggcggagtttgtacgcgagttcgccccaaggcggcgtgtgcagtggcgtggacgcaaagtgcggcctgtgctgagacctggaaccacggtggtctttacgcccggcgagcgctccagcactgcttttaagcggtcctatgatgaggtgtatggggatgatgatattctggagcaggcggccgaccgcctgggcgagtttgcttatggcaagcgctcccgctcgagccccaaggaggaggcggtgtccattcccttggacaatgggaatcccacccctagtctcaagccagtcaccctgcagcaagtgctgcccgtgcctccacgcagaggcaacaagcgagagggtgaggatctgtatcccactatgcaattgatggtgcccaagcgccagcggctggaggacgtgctggagaaaatgaaagtggatcccgatatacaacctgaggtcaaagtgagacccatcaagcaggtggcgccaggtttgggagtacaaaccgtagacatcaagattcccaccgagtccatggaagtccaaaccgaacctgcaaagcccacaaccacctccattgaggtgcaaacggatccctggatgaccgcacccgttacaactccagctgctgtcaacaccactcgaagatcccggcgaaagtacggtccagcaagtttgctgatgccaaattatgctctgcacccatccattattccaactccgggttaccgaggcactcgctactaccgcagcaggagcagcacttcccgccgtcgccgcaaaacacctgcaagtcgtagtcaccgtcgtcgccgccgccccaccagcaatctgactcccgctgctctggtgcggagagtgtatcgcgatggccgcgcggatcccctgacgttgccgcgcgtacgctaccatccaagcatcacaacttaacaactgttgccgctgcctccttgcagatatggccctcacttgccgccttcgtgtccccattactggctaccgaggaagaaactcgcgccgtagaagagggatgttggggcgcggaatgcgacgccacaggcggcggcgcgctatcagcaagaggctggggggtggctttctgcctgctctgatccccatcatagccgcggcgatcggggcgataccaggcatagcttccgtggcggttcaggcctcgcagcgccactgacattggaaaaacttataaataaaacagaatggactctgatgctcctggtcctgtgactatgtttttgtagagatggaagacatcaatttttcatccctggctccgcgacacggcacgaggccgtacatgggcacctggagcgacatcggcaccagccaactgaacgggggcgccttcaattggagcagtatctggagcgggcttaaaaattttggctctaccataaaaacctatgggaacaaagcttggaacagcagcacagggcaggcattgagaaataagcttaaagagcaaaacttccaacagaaggtggttgatggaatcgcctctggtatcaatggggtggtggatctggccaaccaggccgtgcagaaacagataaacagccgcattgacccgccgccgtcagccccgggtgaaatggaagtggaggaagatctccctccccttgaaaagcggggcgacaagcgtccgcgccccgatctggaggagacactagtcacacgctcagacgacccgccctcctacgaggaggcagtgaagcttggaatgcccaccaccagacctgtagcccccatggctaccggggtaatgaaaccttctcagtcacaccgacccgctaccttggacttgcctccccctgctgttgcagcgcctgctcgcaagcctgtcgctaccccgaagcccaccaccgtacagcccgtcgccgtagccagaccgcgtcctgggggcactccacgtccgaatgcaaactggcagagtactctgaacagcatcgtgggtctgggcgtgcaaagtgtaaagcgccgtcgctgcttttaaattaatatggagtagcgcttaacttgcctgtctgtgtgtatgtgtcatcatcacgccgccgccgcagcaacagcagaggagcaaggaagaggtcgcgcgccgaggctgagttgatttcaagatggccaccccatcgatgctgccccagtgggcatacatgcacatcgccggacaggatgcttcggagtacctgagtccgggtctggtgcagttcgcccgcgccacagacacctacttcaatctggggaacaagtttaggaaccccaccgtggcgcccacccatgatgtgaccaccgaccgcagtcagcggctgatgctgcgctttgtgcccgttgaccgggaagacaatacctacgcatacaaagttcgatacaccttggctgtgggcgacaacagagtgctggatatggccagcactttctttgacattcggggtgtgttggatagaggccctagcttcaagccatactctggcactgcttacaactcgttggcccctaagggcgctcccaatacatctcagtggattgctgaaggcgtaaaaaaagaagatgggggatctgacgaagaggaagagaaaaatctcaccacttacacttttggaaatgccccagtgaaagcagaaggtggtgatatcactaaagacaaaggtcttccaattggttcagaaattacagacggcgaagccaaaccaatttatgcagataaactataccaaccagaacctcaggtgggagatgaaacttggactgacacagatggaacaactgagaagtatggtggtagagctctaaagccagaaactaaaatgaaaccctgctatgggtcttttgctaaacccactaacgtcaaaggcggacaggcaaaacaaaaaactactgaacaaccgcaaaaccagcaggttgaatatgatattgacatgaacttttttgatgaagcgtcacagaaagcaaacttcagtccaaaaattgtgatgtatgcagaaaatgtagacttggaaaccccagacactcatgtggtgtacaaacctggtacttcagaagaaagttctcatgctaatctgggtcaacaatctatgcccaacagacccaactacattggctttagagataactttattggacttatgtactacaacagtactggcaacatgggagtgctggcaggtcaagcatcccaattgaatgcggtggttgacttgcaggacagaaacacagaactatcatatcaactactgcttgactctctgggtgacagaaccagatacttcagcatgtggaatcaagcagtcgatagctatgatcctgatgtgcgcattattgaaaatcatggggtggaagatgagcttcccaactactgctttccattggatggagtaggggtaccaataagtagttacaaaataattgaaccaaacggacagggtgcagattggaaagagcctgacataaatggaacaagtgaaattggacaaggaaatctctttgccatggaaattaacctccaagctaatctctggagaagttttctttattccaatgtggctctgtatctcccagactcctacaaatacaccccagccaatgtcactcttccaactaacaccaacacttatgactacatgaatgggcgggtggttcccccatccctggtggatacctacgtaaacattggcgccagatggtctttggatgccatggacaatgtcaacccctttaaccatcaccgcaacgctggcctgcgataccggtccatgcttttgggcaatggtcgttacgtgcctttccacattcaagtgcctcagaaattctttgctgtgaagaacctgctgcttctacccggttcttacacctacgagtggaacttcagaaaggatgtgaacatggtcctgcagagttcccttggtaatgatctccgggtcgatggtgccagcataagttttaccagcatcaatctctatgccaccttcttccccatggcccacaacactgcctccacccttgaagccatgctgcgcaatgacaccaatgatcaatcattcaatgactacctttctgctgccaacatgctctaccccatcccggccaacgctaccaacgttcccatctccattccctctcgcaactgggccgccttcagaggctggtccttcaccagactcaaaaccaaggagactccctctttgggatcagggttcgatccctactttgtttactctggttctataccctacctggatggtaccttctaccttaaccacactttcaagaaagtctccatcatgtttgactcttcagtgagctggcctggtaatgacagattgctaagtccaaatgagttcgaaatcaagcgcacagttgatggggaaggctacaatgtggcccaatgtaacatgaccaaagactggttcctggtccagatgcttgccaactacaacattggataccagggcttctacgttcctgagggttacaaggatcgcatgtactccttcttcagaaacttccagcccatgagtagacaggtggttgatgagattaactacaaagactataaagctgtcgccgtaccctaccagcataataactctggctttgtgggttacatggctcctaccatgcgtcagggtcaagcgtaccctgctaactacccataccccctaattggaaccactgcagtaaccagtgtcacccagaaaaaattcctgtgcgacaggaccatgtggcgcatcccattctctagcaacttcatgtccatgggtgcccttacagacctgggacagaacttgctgtatgccaactcggcccatgcgctggacatgacttttgaggtggatcccatggatgagcccaccctgctttatcttcttttcgaagtcttcgacgtggtcagagtgcaccagccacaccgcggcgtcatcgaggccgtctacctgcgcacaccgttctcggccggcaacgccaccacataagaagcctcttgcttcttgcaagcagcagctgcagccatgtcatgcgggtccggaaacggctccagcgagcaagagctcaaagccatcgtccgagacctgggctgcggaccctatttcctgggaacctttgacaagcgtttcccggggttcatggcccccgacaagctcgcctgcgccatagtcaacactgccggacgcgagacggggggagagcactggctggcttttggttggaacccgcgctccaacacctgctacctttttgatccttttgggttctcggatgagcgactcaaacagatttaccagtttgagtacgaggggctcctgcgccgcagtgcccttgctaccaaagaccgctgcatcaccctggaaaagtccacccagagcgtgcagggcccgcgctcagccgcctgtggacttttttgctgtatgttccttcatgcctttgtgcactggcccgaccgccccatgaacggaaaccccaccatgaagttgctgactggggtgtcaaacagcatgctccaatcaccccaagtccagcccaccctgcgtcgcaaccaggaggcgctatatcgcttcctaaacacccactcatcttactttcgttctcaccgcgcacgcatcgaaagggccaccgcgtttgaccgtatggatatgcaataagtcatgtaaaaccgtgttcaataaaaagcactttatttttacatgcactaaggctctggttttttgctcattcgttttcatcattcactcagaaatcaaatgggttctggcgtgagtcagagtgacccgtgggcagggagacgttgcggaactgtaacctgttctgccacttgaactcggggatcaccagcttgggaactggaatttcgggaaaggtgtcttgccacaactttctggtcagttgcagggcgccaagcaggtcaggagcagagatcttgaaatcacagttggggccggcattctggacacgggagttgcggtacactgggttgcaacactggaacaccatcaaggctgggtgtctcacgcttgccagcacggtcgggtcactgatggtagtcacatccaagtcttcagcattggccattccaaagggggtcatcttacaggtctgcctgcccatcacgggagcgcagcctggcttgtggttgcaatcgcaatgaatggggatcagcatcatcctggcttggtcgggggttatccctgggtacacggccttcatgaaggcttcgtactgcttgaaagcttcctgagccttacttccctcggtgtaaaacatcccacaggacttgctggaaaattggttagtagcacagttggcatcattcacacagcagcgggcatcgttgttggccaactggaccacatttctgccccagcggttctgggtgatcttggctctgtctgggttctccttcatagcgcgctgcccgttttcgctcgccacatccatctcgataatgtggtccttctggatcataatagtgccatgcaggcatttcaccttgccttcgtaatcggtgcatccatgagcccacagagcgcacccggtgcactcccaattattgtgggcgatctcagaataagaatgcaccaatccctgcatgaatcttcccatcatcgctgtcagggtcttcatgctactaaatgtcagcgggatgccacggtgctcctcgttcacatactggtggcagatacgcttgtactgctcgtgctgctctggcatcagcttgaaagaggttctcaggtcattatccagcctatacctctccattagcacagccatcacttccatgcccttctcccaggcagataccaggggcaagctcaaaggattcctaacagcaatagaagtagctcctttagctatagggtcattcttgtcgatcttctcaacacttctcttgccatccttctcaatgatgcgcaccggggggtagctgaagcccacggccaccaactgagcctgttctctttcttcttcgctgtcctggctgatgtcttgcagagggacatgcttggtcttcctgggcttcttcttgggagggatcgggggaggactgttgctccgttccggagacagggatgaccgcgaagtttcgcttaccagtaccacctggctctcgatagaagaatcggaccccacgcgacggtaggtgttcctcttcgggggcagaggtggaggcgactgagatgggctgcggtccggccttggaggcggatggctggcagagcccattccgcgttcgggggtgtgctcccgttggcggtcgcttgactgatttcctccgcggctggccattgtgttctcctaggcagagaaacaacagacatggaaactcagccatcactgccaacatcgctgcaagcgccatcacacctcgcccccagcagcgacgaggaggagagcttaaccaccccaccacccagtcccgctaccaccacctctaccctcgatgatgaggaggaggtcgacgcagcccaggagatgcaggcgcaggataatgtgaaagcggaagagattgaggcagatgtcgagcaggacccgggctatgtgacaccggcggagcacgaggaggagctgaaacgttttctagacagagaggatgacgaccgcccagagcatcaccaggaggctggcctcggggatcatgttgccgactacctctccgggcttgggggggaggacgtgctcctcaaacatctagcaaggcagtcgatcatagttaaagacgcactactcaacctcaccgaagtgcccatcagtgtggaagagcttagccgcgcctacgagctgaacctcttttcgcctcagataccccccaagcggcagcgaaacggcacctgcgaggccaaccctcgactcaacttctatccagcttttactgtccccgaagtgctggccacctaccacatcttttttaagaaccaaaagattccagtctcctgccgcgccaaccgcacccgcgcagatgcccttctcaacttgggtccgggagctcgtttacctgatatagcttccttggaagaggttccaaagatctttgagggtctgggaagtgatgagactcgggccgcaaatgctctgcaacagggagagaatggcatggatgaacatcacagcgctctagtggaactggagggtgacaatgcccggcttgcagtgctcaagcgcagtatcgtggtcacccattttgcctaccccgctgttaacctgccgcccaaagtcatgagcgctgtcatggaccatctgctcatcaaacgagcaagtccactttcagaaaaccagaacatgcaggatccagacgcctcggacgagggcaagccggtagtcagtgacgagcagctatctcgctggctgggtaccaactccccccgagatttggaagaaagacgcaagcttatgatggctgtagtgctagtaactgttgagttggagtgtctgcgccgcttttttaccgaccccgagaccctgcgcaagctagaggagaacctgcactacaccttcagacatggcttcgtgcgccaggcatgcaagatctccaacgtggagctcaccaacctggtttcatacatgggcattttgcatgagaaccggctagggcagagcgttctgcacaccaccctgaagggggaggcccgccgcgactacatccgagactgtgtctacctctacctctgccatacctggcagactggtatgggtgtgtggcaacagtgtttggaagagcagaaccttaaagagctggacaagctcttgcagagatccctcaaagccctgtggacaggttttgacgagcgcaccgtcgcctcggacctggcggacatcatcttccccgagcgtcttagggttactctgcgaaacggcctgccagacttcatgagccagagcatgcttaacaactttcgctctttcatcctggaacgctccggtatcctgcctgccacctgctgtgcgctgccctccgactttgtgcctctcacctaccgcgagtgcccaccgccgctatggagccactgctacctattccgcctggccaactacctctcctaccactcggatgtgatagaggatgtgagcggagacggcctgctggaatgccactgccgatgcaatttatgcacaccccaccgctccctcgcctgcaacccccagttgctaagcgagacccagatcatcggcaccttcgagttgcagggtcccaacagtgaaggcgaggggtcttctccggggcagagtctgaaactgacaccggggctgtggacctccgcctacctgcgcaagttttatcccgaggactatcatccctatgagatcaggttctatgaggaccagtcacatcctcccaaagtcgagctctcagcctgcgtcatcacccagggggcaattctggcccaattgcaagccatccaaaaatcccgccaagaatttctgctgaaaaagggaagcggggtctaccttgacccccagaccggtgaggagctcaacacaaggttcccccaggatgtcccatcgccgaggaagcaagaagctgaaggtgcagctgtcacccccagaggatatggaggaagactgggacagtcaggcagaggaggagatggaagattgggacagccaggcagaggaggtggacagcctggaggaagacagtttggaggaggaagacgaggaggcagaggaggtggaagaagcaaccgccgccaaacagttgtcatcggcggcggagacaagcaagtccccagacagcagcacggctaccatctccgctccgggtcggggggcccagcggcggcccaacagtagatgggacgagaccgggcgatttccaaacccgaccaccgcttccaagaccggtaagaaggagcgacagggatacaagtcctggcgtggacataaaaacgctatcatctcctgcttgcatgaatgcgggggcaacatatccttcacccggcgatacctgcttttccaccacggtgtgaacttcccccgcaatatcttgcattactaccgtcacctccacagcccctactgcagtcagcaagtcccggcaaccccgacagaaaaagacagcagcgacaacggtgaccagaaaaccagcagttagaaaatccacaacaagtgcagcaggaggaggactgaggatcacagcgaacgagccagcgcagaccagagagctgaggaaccggatctttccaaccctctatgccatcttccagcagagtcgggggcaagagcaggaattgaaagtaaaaaaccgatctctgcgctcgctcaccagaagttgtttgtatcacaagagcgaagaccaacttcagcgcactctcgaggacgccgaggctctcttcaacaagtactgcgcgctgactcttaaagagtagcccttgcccgcgctcattcgaaaacggcgggaatcacgtcacccttggcagctgtcctttgccctcgtcatgagtaaagacattcccacgccttacatgtggagctatcagccccaaatggggttggcagcaggtgcttcccaggactactccacccgcatgaattggcttagcgccgggccctcaatgatatcacgggttaatgatatacgagcttatcgaaaccagttactcctagaacagtcagctcttaccaccacaccccgccaacaccttaatccccgaaattggcccgccgccctggtgtaccaggaaaatcccgctcccaccaccgtactacttcctcgagacgcccaggccgaagttcagatgactaacgcaggtgtacagctggcgggcggttccgccctatgtcgtcaccggcctcaacagagtataaaacgcctggtgatcagaggccgaggtatccagctcaacgacgagtcggttagctcttcgcttggtctgcgaccagacggagtcttccagatcgccggctgtgggagatcttccttcactcctcgtcaggctgtgctgactttggagagttcgtcctcgcagccccgctcgggcggcatcggaactctccagtttgtggaggagtttactccctctgtctacttcaaccccttctccggctctcctggccagtacccggacgagttcataccgaacttcgacgcaatcagcgagtcagtggatggctatgattgatgtctaatggtggcgcggctgagctagctcgactgcgacacctagaccactgccgccgctttcgctgtttcgcccgggaactcaccgagttcatttacttcgaactctccgaggagcaccctcagggtccggcccacggagtgcggattaccatcgaagggggaatagactctcgcctgcatcgcatcttctcccagcggcccgtgctgattgagcgcgaccagggaaatacaaccatctccatctactgcatctgtaaccaccccggattgcatgaaagcctttgctgtcttgtttgtgctgagtttaataaaaactgagttaagaccctcctacggactaccgcttcttcaatcaggactttacaacaccaaccagatcttccagaagacccagacccttcctcctctgatccaggactctaactctaccttaccagcaccctccactactaaccttcccgaaactaacaagcttggatctcatctgcaacaccgcctttcacgaagccttctttctgccaatactaccactcccaaaaccggaggtgagctccgcggtcttcctactgacgacccctgggtggtagcgggttttgtaacgttaggattagttgcgggtgggcttgtgctaatcctttgctacctatacacaccttgctgtgcatatttagtcatattgtgctgttggtttaagaaatgggggccatactagtcgtgcttgctttactttcgcttttgggtctgggctctgctaatctcaatcctcttgatcacgatccatgtctagacttcgacccagaaaattgcacacttacttttgcacccgacacaagccgtctctgtggagttcttattaagtgcggatgggactgcaggtccgttgaaattacacataataacaaaacatggaacaatacattatccaccacatgggaaccaggagttcccgagtggtatactgtctctgtccgaggtcctgacggttccattcgcattagtaacaacactttcattttttctgaaatgtgcgatctggccatgtttatgagcaaacagtatgacctatggcctcctagcaaagagaacattgtggcattttccattgcttattgcttggtaacatgcatcatcactgctatcatttgtgtgtgcatacacttgcttatagttattcgccctagacaaagcaatgaggaaaaagagaaaatgccttaacctttttcctcataccttttctttacagcatggcttctgttacagctctaattattgccagcattgtcactgtcgctcacgggcaaacaattgtccatattaccttaggacataatcacactcttgtagggcccccaattacttcagaggttatttggaccaaacttggaagtgttgattattttgatataatttgcaacaaaactgaaccaatatttgtaatctgtaacagacaaaatctcacgttaattaatgttagcaaaatttataacggttactattatggttatgatagatccagtagtcaatataaaaattacttagttcgcataactcagcccaaatcaacagtgccaactatgacaataattaaaatggctaataaagcattagaaaattttacattaccaacaacgcccaatgaaaaaaacattccaaattcaatgattgcaattattgcggcggtggcattgggaatggcactaataataatatgcatgttcctatatgcttgttgctataaaaagtttcaacataaacaggatccactactaaattttaacatttaattttttatacagatgatttccactacaatttttatcattactagccttgcagctgtaacttatggccgttcacacctaactgtacctgttggctcaacatgtacactacaaggaccccaagaaggctatgtcacttggtggagaatatatgataatggagggttcgctagaccatgtgatcagcctggtacaaaattttcatgcaacggaagagacttgaccattattaacataacattaaatgagcaaggcttctattatggaaccaactataaaaatagtttagattacaacattattgtagtgccagccaccacttctgctccccgcaaatccactttctctagcagcagtgccaaagcaagcacaattcctaaaacagcttctgctatgttaaagcttcgaaaaatcgctttaagtaattccacagcagctcccaatacaattcctaaatcaacaattggcatcattactgccgtggtagtgggattaatgattatatttttgtgcataatgtactacgcctgctgctatagaaaacatgaacaaaaaggtgatgcattactaaattttgatattgtttcaatcaaatgccactaacactctcaatgtgcagactactttaaaacatgacatggaaaaccacactacctcctatgcatacacaaatattcagcctaaatacgctatgcaacttagaaatcaccatactaattgtaattggaattcttacactatctgttattctttattttatattctgccgtcaaatacccaatgttcatagaaattctaaaagacgtcccatctattctcctatgattagtcgtccccatatggctctgaatgaaatctaagatctttttttttcttttacagtatggtgaacatcaatcatgattcctagaaatttcttcttcaccatactcatctgtgctttcaatgtctgtgctactttcacagcagtagccactgcaagcccagactgtataggaccatttgcttcctatgcactttttgcctttgttacttgcatctgcgtgtgtagcatagtctgcctggttattaattttttccaactggtagactggatctttgtgcgaattgcctacctacgtcaccatcccgaataccgcaatcaaaatgttgcggcacttcttaggcttatttaaaaccatgcaggctatgctaccagttattttaattctgctactaccctgcattgccctaccttccaccgccactcgcgctacacctgaacaacttagaaaatgcaaatttcaacaaccatggtcatttcttgattgctaccatgaaaaatctgattttcccacatactggatagtgattgttggaataattaacatactttcatgtaccgttttctcaatcacaatataccccacatttaattttgggtggaattctcccaatgcactgggttacccacaagaactagatgaacatatcccactacaacacatacaacaaccactagcattggtagagtatgaaaatgagccacaaccttcactgcctcctgctattagttacttcaacctaaccggcggagatgactgaaatactcaccacctccaattccgccgaggatctgcttgatatggacggccgcgcctcagaacagcgactcgcccaactacgcatccgccagcagcaggaacgcgtgaccaaagagctcagagatgtcatccaaattcaccaatgcaaaaaaggcatattttgtttggtaaaacaagccaagatatcctacgagatcaccgctactgaccatcgcctttcttacgaacttggcccccaacgacaaaaatttacatgcatggtgggaatcaaccctatagttatcacccagcaaagtggagatactaagggttgcattcactgctcttgcgattccaccgagtgcacctacaccctgctgaagaccctatgcggcctaagagacctgctacccatgaattaaaaattaataaaaaattacttacttgaaatcagcaataaggtctctgttgaaattttttcccagcagcacctcgcttccctcttcccaactctggtattctaaaccccgttcagcggcatactttctccatactttaaatgggatgtcaaattttagctcctctcctgtacccacgatcttcatgtctttcttcccagatgaccaagagagtccggctcagtgattccttcaaccctgtctacccctatgaagatgaaagcacctcccaacacccctttataaacccagggtttatttccccaaatggctttacacaaagcccagacggagttcttactttaaattgtttaaccccactaacaaccacaggcgggcctttacagttaaaagtgggagggggacttatagtggatgacactgatgggaccttacaagaaaacatacgtgctacagcacccattactaaaaataatcattctgtagaactatccattggaaatggattagaaacacaaaacaataaactatgtgccaaattgggaaatgggttaaaatttaacaacggtgacatttgtataaaggatagtattaacaccttatggactggaataaagcctccacctaactgtcaaattgtggaaaacactgatacaaacgatggcaaacttactttagtattagtaaaaaacggagggcttgttaatggctacgtatctctagttggtgtatcagacactgtgaaccaaatgttcacacaaaagtcagcaaccatacaattaagattatatttcgactcttctggaaatctattaactgatgaatcaaacttaaaaattccacttaaaaataaatcttctacagcaaccagtgaagctgcaaccagcagcaaagcctttatgccaagtactacagcttatccctttaacaccactactagggatagtgaaaactatattcatggaatatgttactatatgactagttatgatagaagtctagttcccttaaacatttctataatgctaaacagccgtacgatttcttccaatgttgcctatgccatacaatttgaatggaatctaaatgcaaaagaatctccagaaagcaacatagctacgctgaccacatccccctttttcttttcttatattagagaagacgacaactaaaaaataaagtttaagtgtttttatttaaaaatcacaaaattcgagtagttattttgcctcccccttcccatttaacagaatacaccaatctctccccacgcacagctttaaacatttggataccattagagatagacatagttttagtttccacattccaaacagtttcagagcgagccaatctggggtcagtgatacataaaaatgcatcgggatagtcttttaaagcgctttcacagtccaactgctgcggatgcgactccggagtctggatcacagtcatctggaagaagaacgatgggaatcataatccgaaaacggaatcgggcgattgtgtctcatcaaacccacaagcagccgctgtctgcgtcgctccgtgcgactgctgtttatgggatcggggtctgcagtgtcctgaagcatgattttaatagcccttaacattaactttctggtgcgatgcgcgcagcaacgcattctgatttcacttagattactacagtatgtacagcacattatcacaatattgtttaataaaccataattaaaagcgctccagccaaaactcatatctgatacaatcgcccctgcatgaccatcataccaaattttaatataaattaaatgtcgttccctcaaaaacacactacccacatacatgatctcttttggcatgtgcatattaacaatctgtctgtaccatggacaacgttggttaatcatgcaacccaatataaccttccggaaccacactgccaacaccgctcccccagccatgcattgaagtgaaccctgctgattacaatgacaatgaagaacccaattctctcgaccatgaatcacttgagactgaaaaatatctatagtagcacaacaaagacataaatgcatgcatcttctcataatttttaactcatctggatttaaaaacatatcccaaggaatgggaaactcttgcaaaacagtaaagctggcagaacaaggaagaccacgaacacaacttacactatgcatagtcatagtatcacaatctggcaacagcgggtggtcttcagtcatagaagctcgggtttcattttcctcacatcgtggtaactgggctctggtgtaagggtgatgtctggcgcatgatgtcgagcgtgcgcgcaaccttgtcataatggagttgtttcctgacattctcgtattttgtatagcaaaatgcggccctggcacaacacactcttcttcgtcttctatcctgccgcttagtgtgttccgtctgataattcaagtacagccacactcttaagttggtcaaaagaatgctggcttcagttgtaatcaaaactccatcatatttaattgttctaaggaaatcatccacggtagcatatgcaaatcccaaccaagcaatgcaactggattgtgtttcaagcagcagaggagagggaagagacggaagaatcatgttaatttttattccaaacgatctcgcagtacttcaaattgtagatcgcgcagatggcatctatcgcccccactgtgttggtgaaaaagcacagctaaatcaaaagaaatgcgattttcaaggtgctcaacggtggcttccaacaaagcctccacgcgcacatccaaaaacaaaagaataccaaaagaaggagcattttctaactcctcaaacatcatattacattcctgcaccattcccagataattttcagctttccagccttgaattattcgtgtcagttcttgtggtaaatccaaaccacacattacaaacaggtcacggagggcgccctccaccaccattcttaaacacaccctcataatgacaaaatatcttgctcctgtgtcacctgtagcaaattaagaatggcatcatcaattgacatgcccttggctctaagttcttctctaagttctagttgtaaatactctctcatattatcaccaaactgcttagccaaaagccccccgggaacaatagcaggggacgctacagtgcagtacaagcgcagacctccccaattggctccagcaaaaacaagattagaataagcatactgggaaccaccagtaatatcatcaaagttgctggaaatataatcaggcagagtttcttgtaaaaattgaataaaagaaaaattttccaaagaaacattcaaaatctctgggatgcaaatgcaataggttaccgcgctgcgctccaacattgttagttttgaattagtctgcaaaataaaagaaacaagcgtcatatcatagtagcctgtcgaacaggtggataaatcagtctttccatcacaagacaagccacagggtctccagctcgaccctcgtaaaacctgtcatcgtgattaaacaacagcaccgaaagttcctcgcggtggccagcatgaataattcttgatgaagcatataatccagacatgttagcatcagttaaagagaaaaaacagccaacatagcctctgggtataattatgcttaatcttaagtatagcaaagccacccctcgcggatacaaagtaaaaggcacaggagaataaaaaatataattatttctctgccgctgttcaggcaacgtcgcccccggtccatctaaatacacatacaaagcctcatcagccatggcttaccagacaaagaacagcgggcgcacaaagcacaagctctaaagaagctctaaagacactctccaacctctccacaatatatacacaagccctaaactgacgtaatgggagtaaagtataaaaaatcccgccaagcccaacacacaccccgaaactgcgtcagcagggaaaaatacagtttcacttccgcattcccaacaagcgtaagttcctctttctcatggtacgtcacatccgattaacttgcaacgtcattttcccacggtcgcaccgccccttttagccgttcaccccgcagccaatcaccacacagcgcgcacttttttaaattacctcatttgcatattggcaccattccatctataaggtatattatatagatag

SEQ ID NO: 205 - DNA, 34775 bp, Unknown
  Description of Unknown: Human adenovirus 34 sequence
catcatcaataatataccttatagatggaatggtgccaatatgtaaatgaggtgattttaaaaattgtggggtgtgtggtgattggctgtggggttaacggctaaacggggcggcgcggccgtgggaaaatgacgttttgtgggggtggagtttttttgcaagttgtcgcgggaaatgtgacgcataaaaaggctttttttctcacggaactactgacttttcccacggtatttaacaggaaatgaggtagttttgaccggatgcaagtgaaaattgctgatttgcgcgcgaaaactgaatgaggaagtgtttttctgaataatgtggtatttatggcagggtggagtatttgttcagggccaggtagactttgacccattacgtggaggtttcgattaccgtgttttttacctgaatttccgcgtaccgtgtcaaagtcttctgtttttacgtaggtgtcagctgatcgctacggtatttatacctcagggtttgtgtcaagaggccactcttgagtgccagcgagaagagttttctcctctgcgccggcagtttaataataaaaaaatgagagatttgcgatttctgcctcaggaaataatttctgctgagactggaaatgaaatactggagcttgtggtgcacgccctgatgggagacgatccggagccacctgtgcagctttttgagcctcctacgcttcaggaactgtatgatttagaggtagagggatcggaggattctaatgaggaagctgtgaatggcttttttaccgattctatgcttttagctgctaatgaaggattagaattagatccgcctttggacactttcgatactccaggggtgattgtggaaagcggtacaggtgtaagaaaattacctgatttgggttccgtggactgtgatttgcactgctatgaagacgggtttcctccgagtgatgaggaggaccatgaaaaggagcagtctatgcagactgcagcgggtgagggagtgaaggctgccagtgttggttttcagttggattgcccggagcttcctggacatggctgtaagtcttgtgaatttcacaggaaaaatactggagtaaaggaactgttatgttcgctttgttatatgagagcgcactgccactttatttacagtaagtgtgtttaagttaaaatttaaaggaatatgctgtttttcacatgtatattgagtgggagttttgtgcttcttattataggtcctgtgtctgatgctgatgagtcaccatctcctgattctactacctcacctcctgagattcaagcacctgttcctgtggacgtgcgcaagcccattcctgtgaagcttaagcctgggaaacgtccagcagtggaaaaacttgaggacttgttacagggtggggacggacctttggacttgagtacacggaaacggccaagacaataagtgttccatatccgtgtttacttaaggtgacgtcaatatttgtgtgagagtgcaatgtaataaaaatatgttaactgttcactggtttttattgctttttgggcggggactcaggtatataagtagaagcagacctgtatggttagctcataggagctggctttcatccatggaggtttgggccattttggaagaccttagaaagactaggcaactgttagaggacgcttcggacggagtctccggtttttggagattctggttcgctagtgaattagctagggtagtttttaggataaaacaggactataaagaagaatttgaaaagttgttggtagattgcccaggactttttgaagctcttaatttgggccatcaagttcactttaaagaaaaagttttatcagttttagacttttcaaccccaggtagaactgccgctgctgtggcttttcttacttttatattagataaatggatcccgcagactcatttcagcaggggatacgttttggatttcgtagccacagcattgtggagaacatggaaggttcgcaagatgaggacaatcttaggttactggccagtgcagcctttgggtgtagcgggaatcctgaggcatccaccggtcatgccagcggttctggaggaggaacagcaagaggacaacccgagagccggcctggaccctccagtggaggaggcggagtagctgacttgtctcctgaactgcaacgggtgcttactggatctacgtccactggacgggataggggcgttaagagggagagggcatctagtggtactgatgctagatctgagttggctttaagtttaatgagtcgcagacgtcctgaaaccatttggtggcatgaggtccagaaagagggaagggatgaagtttctgtattgcaggagaaatattcactggaacaggtgaaaacatgttggttggagcctgaggatgattgggaggtggccattaaaaattatgccaagatagctttgaggcctgataaacagtataagattactagacggattaatatccggaatgcttgttacatatctggaaatggggctgaggtggtaatagatactcaagacaaggcagttattagatgctgcatgatggatatgtggcctggagtagtcggtatggaagcagtaacttttgtaaatgttaagtttaggggagatggttataatggaatagtgtttatggccaataccaaacttatattgcatggttgtagcttttttggtttcaacaatacctgtgtagatgcctggggacaggttagtgtacggggatgtagtttctatgcgtgttggattgccacagctggcagaaccaagagtcaattgtctctgaagaaatgcatattccaaagatgtaacctgggcattctgaatgaaggcgaagcaagggtccgccactgcgcttctacagatactggatgttttattttaattaagggcaatgccagcgtaaagcataacatgatttgcggtgcttccgatgagaggccttatcaaatgctcacttgtgccggtgggcattgtaatatgctggctactgtgcatattgtttcccatcaacgcaaaaaatggcctgtttttgatcacaatgtgttgaccaagtgtaccatgcatgcaggtgggcgtagaggaatgtttatgccttaccagtgtaacatgaatcatgtgaaagtgttgttggaaccagatgccttttccagaatgagcctaacaggaatctttgacatgaacatgcaaatctggaagatcctgaggtatgatgatacgagatcgagggtgcgcgcatgcgaatgcggaggcaagcatgccaggttccagccggtgtgtgtagatgtgactgaagatctgagaccggatcatttggttattgcccgcactggagcagagttcggatccagtggagaagaaactgactaaggtgagtattgggaaaacttggggtggggttttcagatggacagattgagtaaaaatttgttttttctgtctttcagctgtcatgagtggaaacgcttcttttaaggggggagtcttcagcccttatctgacagggcgtctcccatcctgggcaggagttcgtcagaatgttatgggatctactgtggatggaagacccgtccaacccgccaattcttcaacgctgacctatgctactttaagttcttcacctttggacgcagctgcagccgccgccgccgcctctgttgccgctaacactgtgcttggaatgggttactatggaagtatcgtggctaattccacttcctctaataacccttctaccctgactcaggacaagttacttgtccttttggcccagctggaggctttgacccaacgtctgggtgaactttatcagcaggtggccgagttgcgagtacaaactgagtctgctgtcggcacggcaaagtctaaataaaaaaaaattccacaatcaatgaataaataaacgagcttgttgttgatttaaaatcaagtgtttttatttcatttttcgcgcacggtatgccctagaccaccgatctcgatcattgagaacacggtggattttttccagaatcctatagaggtgggattgaatgtttagatacatgggcattaggccatctttggggtggagatagctccattgaagggattcatgctccggggtagtgttgtaaatcacccagtcataacaaggtcgcagtgcatggtgttgcacaatatcttttagaagtaggctgattgccacagataagcccttggtgtaggtgtttacaaaccggttgagctgggaggggtgcattcggggtgaaattatgtgcattttggattggatttttaagttggcaatattgccgccaagatctcgtcttgggttcatgttatgaaggaccaccaagacggtgtatccggtacatttaggaaatttatcgtgtagcttggatggaaaagcgtggaaaaatttggagacacccttgtgtcctccgagattttccatgcactcatccatgataatagcaatggggccgtgggcagcagcgcgggcaaacacgttccgtgggtctgacacatcatagttatgttcctgagttaaatcatcataagccattttaatgaatttggggcggagagtacccgattggggtatgaatgttccttcgggccccggagcatagttcccctcacagatttgcatttcccaagctttcagttccgatggtggaatcatgtccacctggggggctatgaagaacaccgtttctggggcgggggtgattagttgggatgatagcaagtttctgagcaattgagatttgccacatccggtggggccataaatgattccgattacaggttgcaggtggtagtttagggaacggcaactgccgtcttctcgaagcaagggggccacctcgttcatcatttcccttacatgcatattttcccgcaccaaatccattaggaggcgctctcctcctagtgatagaagttcttgtagtgaggaaaagtttttcagcggttttagaccgtcagccatgggcattttggagagagtttgctgcaaaagttctagtctgttccacagttcagtgatgtgttctatggcatctcgatccagcagacctcctcgtttcgcgggtttggacggctcctggagtagggtatgagacgatgggcgtccagcgctgccagggttcggtccttccagggtctcagtgttcgagtcagggttgtttccgtcacagtgaaggggtgtgcgcctgcttgggcgcttgccagggtgcgcttcagactcattctgctggtggagaacttctgtcgcttggcgccctgtatgtcggccaagtagcagtttaccatgagttcgtagttgagcgcctcggctgcgtggcctttggcgcggagcttacctttggaagttttcttgcataccgggcagtataggcatttcagcgcatacagcttgggcgcaaggaaaatggattctggggagtatgcatctgcgccgcaggaggcgcaaacagtttcacattccaccagccaggttaaatccggttcattggggtcaaaaacaagttttccgccatattttttgatgcgtttcttacctttggtctccatgagttcgtgtcctcgttgagtgacaaacaggctgtccgtatccccgtagactgattttacaggcctcttctccagtggagtgcctcggtcttcttcgtacaggaactctgaccactctgatacaaaggcgcgcgtccaggccagcacaaaggaggctatgtgggaggggtagcgatcgttgtcaaccagggggtccaccttttccaaagtatgcaaacacatgtcaccctcttcaacatccaggaatgtgattggcttgtaggtgtatttcacgtgacctggggtccccgctgggggggtataaaagggggcggttctttgctcttcctcactgtcttccggatcgctgtccaggaacgtcagctgttggggtaggtattccctctcgaaggcgggcatgacctctgcactcaggttgtcagtttctaagaacgaggaggatttgatattgacagtgccggttgagatgcctttcatgaggttttcgtccatttggtcagaaaacacaatttttttattgtcaagtttggtggcaaatgatccatacagggcgttggataaaagtttggcaatggatcgcatggtttggttcttttccttgtccgcgcgctctttggcagcgatgttgagttggacatactcgcgtgctaggcacttccattcggggaagatagttgtcaattcatctggcacgattctcacttgccaccctcgattatgcaaggtaattaaatccacactggtggccacctcgcctcgaaggggttcgttggtccaacagagcctacctcctttcctagaacagaaagggggaagtgggtctagcataagttcatcgggagggtctgcatccatggtaaagattcccggaagtaaatccttatcaaaatagctgatgggagtggggtcatctaaggccatttgccattctcgagctgccagtgcacgctcatatgggttaaggggactgccccagggcatgggatgggtgagtgcagaggcatacatgccacagatgtcatagacgtagatgggatcctcaaagatgcctatataggttggatagcatcgcccccctctgatacttgctcgcacatagtcatatagttcatgtgatggcgctagcaaccccggacccaagttggtgcgattgggtttttctgttctgtagacaatctggcgaaagatggcgtgagaattggaagagatggtgggtctttgaaaaatgttgaaatgggcatgaggtagacctacagagtctctgacaaagtgggcataagattcttgaagcttggttaccagttcggcggtgacaagtacgtctagggcgcagtagtcaagtgtttcttgaatgatgtcataacctggttggtttttcttttcccacagttcgcggttgagaaggtattcttcgcgatccttccagtactcttctagcggaaacccgtctttgtctgcacggtaagatcctagcatgtagaactgattaactgccttgtaagggcagcagcccttctctacgggtagagagtatgcttgagcagcttttcgcagcgaagcgtgagtaagggcgaaggtgtctctgaccatgactttgagaaattggtatttgaagtccatgtcgtcacaggctccctgttcccagagttggaagtctacccgtttcttgtaggcggggttgggcaaagcgaaagtaacatcgttgaagagaatcttaccggctctgggcataaaattgcgagtgatgcggaaaggctgtggtacttccgctcgattgttgatcacctgggcagctaggacgatctcgtcgaaaccgttgatgttgtgtcctacgatgtataattctatgaaacgcggcgtgcctttgacgtgaggtagcttattgagctcatcaaaggttaggtctgtagggtcagataaggcgtagtgttcgagagcccattcgtgcaggtgaggatttgcatgtaggaatgatgaccaaagatccaccgccagtgctgtttgtaactggtcccgatactgacgaaaatgctggccaattgccattttttctggagtgacacagtagaaggttctggggtcttgttgccatcgatcccactttagtttaatggctagatcgtgggccatgttgacgagacgctcttctcctgagagtttcatgaccagcatgaaaggaactagttgtttgccaaaggaccccatccaggtgtaagtttccacatcgtaggtcaggaagagtctttctgtgcgaggatgagagccgatcgggaagaactggatttcctgccaccagttggaggattggctgttgatgtgatggaagtagaagtttctgcggcgcgccgagcattcgtgtttgtgcttgtacagacggccgcagtagtcgcagcgttgcacgggttgtatctcgtgaatgagctgtacctggcttcccttgacgagaaatttcagtgggaagccgaggcctggcgattgtatctcgtgctcttctatattcgctgtatcggcctgttcatcttctgtttcggtggtggtcatgctgacgagcccccgcgggaggcaagtccagacctcggcgcgggaggggcggagctgaaggaccagagcgcgcaggctggagctgtccagagtcctgagacgctgcggactcaggttagtaggtagggacagaagattaacttgcatgatcttttccagggcgtgcgggaggttcagatggtacttgatttccacaggttcgtttgtagagatgtcaatggcttgcagggttccgtgtcctttgggcgccactaccgtacctttgttttttcttttgatcggtggtggctctcttgcttcttgcatgctcagaagcgatgacggggacgcgcgccgggcggaagcggttgttccggacccggaggcatggctggtagtggcacgtcggcgccgcgcacgggcaggttctggtactgcgctctgagaagacttgcgtgcgccaccacgcgtcgattgacgtcttgtatctgacgtctctgggtgaaagctaccggccccgtgagcttgaacctgaaagagagttcaacagaatcaatttcggtatcgttaacggcagcttgtctcagtatttcttgtacgtcaccagagttgtcctggtaggcgatctccgccatgaactgctcgatttcttcctcctgaagatctccgcgacccgctctctcgacggtggccgcgaggtcattggagatacggcccatgagttgggagaatgcagtcatgcccgcctcgttccagacgcggctgtaaaccacggccccctcggagtctcttgcgcgcatcaccacctgagcgaggttaagctccacgtgtctggtgaagaccgcatagttgcataggcgctgaaaaaggtagttgagtgtggtggcaatgtgttcggcgacgaagaaatacatgatccatcgtctcagcggcatttcgctgacatcgcccagagcttccaagcgctccatggcctcgtagaagtccacggcaaaattaaaaaactgggagtttcgcgcggacacggtcaattcctcctcgagaagacggatgagttcggctatggtggcccgtacttcgcgttcgaaggctcccgggatctcttcttcctcttctatctcttcttccactaacatctcttcttcgtcttcaggcgggggcggagggggcacacggcgacgtcgacggcgcacgggcaaacggtcgatgaatcgttcaatgacctctccgcggcggcggcgcatggtttcagtgacggcgcggccgttctcgcgcggtcgcagagtaaaaacaccgccgcgcatctccttaaagtggtgactgggaggttctccgtttgggagggagagggcgctgattatacattttattaattggcccgtagggactgcgcgcagagatctgatcgtgtcaagatccacgggatctgaaaacctttcgacgaaagcgtctaaccagtcacagtcacaaggtaggctgagtacggcttcttgtgggcgggggtggttatgtgttcggtctgggtcttctgtttcttcttcatctcgggaaggtgagacgatgctgctggtgatgaaattaaagtaggcagttctaagacggcggatggtggcgaggagcaccaggtctttgggtccggcttgctggatacgcaggcgattggccattccccaagcattatcctgacatctagcaagatctttgtagtagtcttgcatgagccgttctacgggcacttcttcctcacccgttctgccatgcatacgtgtgagtccaaacccgcgcattggttgtaccagtgccaagtcagctacgactctttcggcgaggatggcttgctgtacttgggtgagggtggcttgaaagtcatcaaaatccacaaagcggtggtaagccccggtattaatggtgtaagcacagttggccatgactgaccagttaactgtctggtgaccagggcgcacgagctcggtgtatttaaggcgcgaataggcgcgggtgtcaaagatgtaatcgttgcaggtgcgcaccagatactggtaacctataagaaaatgcggcggtggttggcggtagagaggccatcgttctgtagctggagcgccgggggcgaggtcttccaacataaggcggtgatagccgtagatgtacctggacatccaggtgattcctgcggcggtagtagaagcccgaggaaactcgcgtacgcggttccaaatgttgcgtagcggcatgaagtagttcattgtaggcacggtttgaccagtgaggcgcgcgcagtcattgatgctctatagacacggagaaaatgaaagcgttcagcgactcgactccgtagcctggaggaacgtgaacgggttgggtcgcggtgtaccccggttcgagacttgtactcgagccggccggagccgcggctaacgtggtattggcactcccgtctcgacccagcctacaaaaatccaggatacggaatcgagtcgttttgctggttgccgaatggcagggaagtgagtcctattttttttttttgccgctcagatgcatcccgtgctgcgacagatgcgtccccaacaacagcccccctcgcagcagcagcaaccacaaaaggctgtccctgcaactactgcaactgccgctgtgagcggtgcgggacagcccgcctatgatctggacttggaagagggcgaaggactggcacgtctaggtgcgccttcgcccgagcggcatccgcgagttcaactgaaaaaagattctcgcgaggcgtatgtgccccaacagaacctatttagagacagaagcggcgaggagccggaggagatgcgagcttcccgctttaacgcgggtcgtgagctgcgtcacggtttggacagaagacgagtgttgcgggacgaggatttcgaagttgatgaagtgacagggatcagtcctgccagggcacacgtggctgcagccaaccttgtatcggcttacgaacagacagtaaaggaagagcgtaatttccaaaagtcttttaataatcatgtgcgaaccctcattgcccgcgaagaagtcacccttggtttgatgcatttgtgggatttgatggaagctatcattcagaaccctactagcaaacctctgaccgcacagctgtttctggtggtgcaacacagcagagacaatgaggctttcagagaggcgctgctcaacatcaccgaacccgaggggagatggttgtatgatcttatcaacattctacagagtatcatagtgcaggagcggagcctgggcctggccgagaaggtggctgccatcaattactcggttttgagcttgggaaagtattacgctcgcaagatctacaagactccatacgttcccatagacaaggaggtgaagatagatgggttctacatgcgcatgacgctgaaggtgttgaccctgagcgatgatcttggggtgtaccgcaatgacagaatgcatcgcgcggtgagcgccagcaggaggcgcgagttaagcgacagggaactgatgcacagtttgcaaagagctctaactggagctggaaccgagggtgagaattactttgatatgggagctgacttgcagtggcagcctagtcgcagggctctgaacgccgcgacggcaggatgtgagcttccttacatagaagaggcggatgaaggcgaggaggaagagggcgagtacttggaagactgatggcacaacccgtgttttttgctagatggaacagcaagcaccggatcccgcaatgcgggcggcgctgcagagccagccgtccggcattaactcctcggacgattggacccaggccatgcaacgtatcatggcgttgacgactcgcaaccccgaagcctttagacagcaaccccaggccaaccgtctatcggccatcatggaagctgtagtgccttcccgctctaatcccactcatgagaaggtcctggccatcgtgaacgcgttggtggagaacaaagctattcgtccagatgaggccggactggtatacaacgctctcttagaacgcgtggctcgctacaacagtagcaatgtgcaaaccaatttggaccgtatgataacagatgtacgcgaagccgtgtctcagcgcgaaaggttccagcgcgatgccaacctgggttcgctggtggcgttaaatgctttcttgagtactcagcctgctaatgtgccgcgtggtcaacaggattatactaactttttaagtgctttgagactgatggtatcagaagtacctcagagcgaagtatatcagtccggtcctgattacttctttcagactagcagacagggcttgcagacggtaaatctgagccaagcttttaaaaaccttaaaggtttgtggggagtgcatgccccggtaggagaaagagcaaccgtgtctagcttgttaactccgaactcccgcctattattactgttggtagctcctttcaccgacagcggtagcatcgaccgtaattcctatttgggttacctactaaacctgtatcgcgaagccatagggcaaagtcaggtggacgagcagacctatcaagaaattacccaagtcagtcgcgctttgggacaggaagacactggcagtttggaagccactctgaacttcttgcttaccaatcggtctcaaaagatccctcctcaatatgctcttactgcggaggaggagaggatccttagatatgtgcagcagagcgtgggattgtttctgatgcaagagggggcaactccgactgcagcactggacatgacagcgcgaaatatggagcccagcatgtatgccagtaaccgacctttcattaacaaactgctggactacttgcacagagctgccgctatgaactctgattatttcaccaatgccatcttaaacccgcactggctgcccccacctggtttctacacgggcgaatatgacatgcccgaccctaatgacggatttctgtgggacgacgtggacagcgatgttttttcacctctttctgatcatcgcacgtggaaaaaggaaggcggcgatagaatgcattcttctgcatcgctgtccggggtcattggtgctaccgcggctgagcccgagtctgcaagtccttttcctagtctacccttttctctacacagtgtacgtagcagcgaagtgggtagaataagtcgcccgagtttaatgggcgaagaggagtacctaaacgattccttgctcagaccggcaagagaaaaaaatttcccaaacaatggaatagaaagtttggtggataaaatgagtagatggaagacttatgctcaggatcacagagacgagcctgggatcatggggactacaagtagagcgagccgtagacgccagcgccatgacagacagaggggtcttgtgtgggacgatgaggattcggccgatgatagcagcgtattggacttgggtgggagaggaaggggcaacccgtttgctcatttgcgccctcgcttgggtggtatgttgtaaaaaaaaataaaaaagaaaaaactcaccaaggccatggcgacgagcgtacgttcgttcttctttattatctgtgtctagtataatgaggcgagtcgtgctaggcggagcggtggtgtatccggagggtcctcctccttcgtacgagagcgtgatgcagcagcagcaggcgacggcggtgatgcaatccccactggaggctccctttgtgcctccgcgatacctggcacctacggagggcagaaacagcattcgttactcggaactggcacctcagtacgataccaccaggttgtatctggtggacaacaagtcggcggacattgcttctctgaactatcagaatgaccacagcaacttcttgaccacggtggtgcaaaacaatgactttacccctacggaagccagcacccagaccattaactttgatgaacgatcgcggtggggcggtcagctaaaaaccatcatgcatactaacatgcccaacgtgaacgagtatatgtttagtaacaagttcaaagcgcgtgtgatggtgtccagaaaacctcctgagggtgttagagtagacgataattatgatcataagcaagatattctaaaatacgagtggttcgagtttactttgccagaaggcaacttttcggtcactatgactatcgacttgatgaacaatgccatcatagacaattacttgaaagtgggcagacagaatggagtgttggaaagtgacattggtgttaagttcgacactaggaacttcaagttgggatgggatccagaaactaagttgatcatgcctggggtttacacctatgaggccttccatcctgacatcgtattgctgcctggctgcggagtggactttaccgaaagccgtctgagcaaccttcttggcattagaaagaaacacccattccaagagggttttaagatcttgtatgaggatttagaaggaggaaatattccagcccttttggatgtagatgcttatgagaacagcaagaaagatcaaaaagccaaaatagaagctgctgcagaagctaaagcaaacatagttgccaacgatccggtaagggtggctaacgctagtgaaatcaggggagacagttttgccgcaacatccgttccgactaaagaatcattattggatgatgtgtctcaaaacatagagttaaaactcactattaagcctgtggaaaaagatggcaaaaacagaagttacaatgtgttggaagataaaatcaacacggcctatcgcagttggtacctttcgtacaattatggcgaccccgaaaaaggagtgcgttcctggacattgctcaccacctcagatgtcacctgcggagcggagcaggtctactggtcgcttccagacatgatgcaggatcctgtcactttccgctccactagacaagtcagtaactaccctgtggtgggtgcagagcttatgcccgtcttttcaaagagcttctacaacgaacaagctgtgtactcccagcagctccgccagtccacctcgcttacgcacgtcttcaaccgctttcctgagaaccagattttaatccgtccgccggcgcccacaattaccaccgtcagtgaaaacgttcctgctctcacagatcacgggaccctgccgttgcgcagcagtatccggggagtccaacgtgtgaccgttactgacgccagacgccgcacctgtccctacgtgtacaaggcactgggcatagtcgcaccgcgcgtcctttcaagccgcactttctaaaaaaaaaaaaaaaatgtccgttcttatctcgcccagtaataacaccggttggggtctgcgcgctcccagcaagatgtacggaggcgcacgcaaacgttctacccaacatcccgtgcgtgttcgcgggcattttcgcgctccatggggtgccctcaagggccgcactcgcgttcgaaccaccgtcgatgatgtaatcgatcaggtggttgccgacgcccgtaattatactcctactgcgcctacatctactgtggacgcagttattgacagtgtagtggctgacgctcgcaactatgctcgacgtaagagccggcgaaggcgcattgccagacgtcaccgagctaccactgccatgcgagcagcaagagctctgctacgaagagctagacgcgtggggcgaagagccatgcttagggcggccagacgtgcagcttcgggcgccagcgccggcaggtcccgcaggcaagcagccgctgtcgcagcggcgactattgccgacatggcccaatcgcgaagaggcaatgtatactgggtgcgtgacgctgccaccggtcaacgtgtacccgtgcgcacccgtccccctcgcacttagaagatactgagcagtctccgatgttgtgtcccagcggcgaggatgtccaagcgcaaatacaaggaagaaatgctgcaggttatcgcacctgaagtctacggccaaccgttgaaggatgaaaaaaaaccccgcaaaatcaagcgggtaaaaaaggacaaaaaagaagaggaagatggcgatgatgggctggcggagtttgtgcgcgagtttgccccacggcgacgcgtgcaatggcgtgggcgcaaagttcgacatgtgttgagacctggaacttcggtggtctttacacccggcgagcgttcaagcgctacttttaagcgttcctatgatgaggtgtacggggatgatgatattcttgagcaggcagctgaccgattaggcgagtttgcttatggcaagcgtagtagaataaatcccaaggatgaaacagtgtccatacccttggatcatggaaatcccacccctagtcttaaaccggtcactttgcagcaagtgttacccgtaactccgcgaacaggtgttaaacgcgaaggtgaagatttgtatcccactatgcaactgatggtgcccaaacgccagaagttggaggacgttttggagaaagtaaaagtggatccagatattcaacctgaggttaaagtgagacccattaagcaggtagcgcctggtctgggagtacaaactgtagacattaaaattcccactgaaagtatggaagtgcaaactgaacccgcaaagcctactgccacctccactgaagtgcaaacggacccatggatgcccatgcctattacaactgacgccgtcggtcccactcgaagatcccgacgaaagtacggtccagcaagtctgttgatgcccaactatgtcgtacacccatctattattcctactcctggttaccgaggcactcgctactatcgcagccgaaacagtacttcccgccgtcgccgcaagacacctgcaaatcgcagtcgtcgccgtagacgcacaagcaaaccgattcccggcgccctggtgcggcaagtgtaccgcaatggtagtgcggaacctttgacactgccgcgtgcgcgttaccatcctagtatcatcacttaatcaatgttgccgctgcctccttgcagatatggccctcacttgtcgccttcgcgttcccatcactggttaccgaggaagaaactcgcgccgtagaagagggatgttggggcgcggaatgcgacgctacaggcgacggcgtgctatccgcaagcaattgcggggtggttttttgccagccttaattccaattatcgctgctgcgattggcgcaataccaggcatagcttccgtggcggttcaggcctcgcaacgacattgacattggaaaaaaaaaaaacgtataaataaaaaatacaatggactctgacactcctggtactgtgactatgttttcttagagatggaagacatcaatttttcatccttggctccgcgacacggcacgaagccgtacatgggcacctggagcgacatcggcacgagccaactgaacgggggcgccttcaattggagcagtatctggagcgggcttaaaaattttggctcaaccataaaaacatacgggaacaaagcttggaacagcagtacaggacaggcgcttagaaataaacttaaagaccagaacttccaacaaaaagtagtcgatgggatagcttccggtatcaatggagtggtagatttggctaaccaggctgtgcagaaaaagataaacagtcgtttggacccgccgccagcaaccccaggtgaaatgcaagtggaggaagaaattcctccgccagaaaaacgaggcgacaagcgtccgcgtcccgatttggaagagacgctggtgacgcgcgtagatgaaccgccttcttatgaggaagcaacgaagcttggaatgcccaccactagaccgatagcccctatggccaccggggtgatgaaaccttctcagttgcatcgacccgtcaccttggatttgccccctcctcctgctgctactgctgtacccgcttctaagcctgtcgctgccccgaaaccagtcgccgtagccaggtcacgtcccgggggcgctcctcgtccaaatgcacactggcaaaatactctgaacagcatcgtgggtctaggcgtgcaaagtgtaaaacgccgtcgctgcttttaattaaatatggagtagcgcttaacttgcctatctgtgtatatgtgtcattacacgccgtcacagcatcagaggaaaaaaggaagaggtcgtgcgtcgacgctgagttactttcaagatggccaccccatcgatgctgccccaatgggcatacatgcacatcgccggacaggatgcttcggagtacctgagtccgggtctggtgcagttcgcccgcgccacagacacctacttcaatctgggaaataagtttagaaatcctaccgtagcgccgacccacgatgtgaccaccgatcgtagccagcggctcatgttgcgcttcgtgcccgttgaccgggaggacaatacatactcttacaaagtgcggtacaccctggccgtgggcgacaacagagtgctggatatggccagcacgttctttgacattaggggcgtgttggacagaggtcccagttttaaaccctattctggtacggcttacaactccctggctcctaaaggcgctccaaatgcatctcagtggttggataagggagttacaagcactggcctagtggacgacggcaatactgatgatggggaagaagccaaaaaagcaacatacacttttggtaatgctccagtaaaagccgaggctgaaatcacaaaagacggattgccggtgggcttggaagtttcaactgaaggtcctaaaccaatctatgctgataagctttatcagccagaacctcaagtgggagacgaaacttggactgacctagacggaaaaaccgaagagtatggagggagggttcttaaacctgaaactaaaatgaaaccctgctacggatcttttgctaaacctactaatattaaaggaggtcaggcaaaggtaaaaccaaaagaagacgatggcactaacaacatcgagtatgacattgacatgaacttctttgacttaagatcacaaagatcagaactcaaacctaaaattgtaatgtatgcagaaaatgtggacctggaatgtccagatactcatgttgtgtacaaacctggagtttcagatgctagttctgagaccaatcttggacaacagtctatgcccaacagacccaactacattggcttcagagataacttcatcggacttatgtactataacagtactggcaacatgggggtactggctggccaagcgtctcagttgaatgcagtggttgacttgcaggacagaaacacagaactgtcttaccaactcttgcttgactctctgggcgacagaaccagatactttagcatgtggaatcaggctgtggacagttatgatcctgatgtacgtgttattgaaaatcatggtgtggaagatgaacttcccaactattgttttccgttggatggtgtcggtccgcgaacagatagttacaaggagattaagccaaatggagaccaatctacttggacaaatgtagacccaactggcagcagtgaacttgctaagggaaatccatttgccatggaaattaaccttcaagccaatctatggcgaagtttcctttattccaatgtggctctatatctcccagactcgtacaaatacaccccgtccaatgtcactcttccagaaaacaaaaacacctacgactacatgaacgggcgggtggtgccgccatctctagtagacacctatgtgaacattggtgccaggtggtctctggatgccatggacaatgtcaacccattcaaccaccaccgtaacgctggcttgcgttaccgatccatgcttctgggtaacggacgttatgtgcctttccacatacaagtgcctcaaaaattcttcgctgttaaaaacctgctgcttctcccaggctcctacacttatgagtggaactttaggaaggatgtaaacatggttctacagagttccctcggtaacgacctacgggtagatggcgccagcatcagttttacgagcatcaacctctatgctacttttttccccatggctcacaacaccgcttccacccttgaagccatgctgcggaatgacaccaatgatcagtcattcaacgactacctatctgcagctaacatgctctaccccattcctgccaatgcaaccaatattcccatttccattccttctcgcaactgggcggctttcagaggctggtcatttaccagactgaaaaccaaagaaactccctctttggggtctggatttgacccctacttcgtctattctggttctattccctacctggatggtaccttctacctgaaccacacttttaagaaggtttccatcatgtttgactcttcagtgagctggcctggaaatgacaggttactatctcctaacgaatttgaaataaagcgcactgtggatggcgaaggctacaacgtagcccaatgcaacatgaccaaagactggttcttggtacagatgctcgccaactacaacatcggctatcagggcttctacattccagaaggatacaaagatcgcatgtattcatttttcagaaacttccagcccatgagcaggcaggtggttgatgaggtcaattacaaagacttcaaggccgtcgccataccctaccaacacaacaactctggctttgtgggttacatggctccgaccatgcgtcaaggtcaaccctatcccgctaactatccctatccactcattggaacaactgccgtaaatagtgttacgcagaaaaagttcttgtgtgacagaaccatgtggcgcataccgttctcaagcaacttcatgtctatgggagcccttacagacttgggacagaacatgctctatgccaactcagctcatgctctggacatgacctttgaggtggatcccatggatgagcccaccctgctttatcttctcttcgaagttttcgacgtggtcagagtgcatcagccacaccgcggcatcatcgaggcagtctacctgcgtacaccgttctcggccggtaacgctaccacgtaagaagcttcttgcttcttgcaaacagcagctgcaaccatggcctgcggatcccaaaacggctccagcgagcaagagctcagagccattgtccaagacctgggttgcggaccatattttttgggaacctttgataagcgcttcccggggttcatggcccccgataagctcgcctgtgccattgtaaatacggccggacgtgagacggggggagagcactggttggctttcggttggaacccacgttctaacacctgctacctttttgatccttttggattctcggatgatcgtctcaaacagatttaccagtttgaatatgagggtctcctgcgccgcagcgctcttgctaccaaggaccggtgtattacgctggaaaaatctacccagaccgtgcagggcccccgttctgccgcctgcggacttttctgctgcatgttccttcatgcctttgtgcactggcctgaccgtcccatggacggaaaccccaccatgaaattgctaactggagtgccaaacaacatgcttcattctcctaaagtccagcccaccctgtgtgacaatcaaaaagcactctaccattttctcaatacccattcgccttattttcgctctcatcgtacacacatcgaaagggccactgcgttcgaccgtatggatgtgcaataatgattcatgtaaacaacgtgttcaataaacagcactttattttttacatgtatcgaggctctggattacttatttatttacaagtcgaatgggttctgacgagaatcagaatgacccgcaggcagtgatacgttgcggaactgatacttgggttgccacttgaattcgggaatcaccaacttgggaaccggtatatcgggcaggatgtcactccacagctttctggtcagctgcaaagctcccagcaggtcaggagccgaaatcttgaaatcacaattaggaccagtgctctgagcgcgagagttgcggtacaccggattgcagcactgaaacaccatcagcgacggatgtcttacgcttgccagcacggtgggatctgcaatcatgcccacatccagatcttcagcattggcaatgctgaacggggtcatcttgcaggtctgcctacccatggcgggcacccaattaggcttgtggttacaatcgcagtgcagggggatcagtatcatcttggcctgatcctgtctgattcctggatacacggctctcatgaaagcatcatattgcttgaaagcctgctgggctttactaccctcggtataaaacatcccgcaggacctgctcgaaaactggttagctgcgcagccggcatcattcacacagcagcgggcgtcattgttggctatttgcaccacacttctgccccagcggttttgggtgattttggttcgctcgggattctccttcaaggctcgttgtccgttctcgctggccacatccatctcgataatctgctccttctgaatcataatattgccatgcaagcacttcagcttgccctcataatcattgcagccatgaggccacaacgcacagcctgtacattcccaattatggtgggcgatctgagaaaaagaatgtatcattccctgcagaaatcttcccatcatcgtgctcagtgtcttgtgactagtgaaagttaactggatgcctcggtgctcctcgttcacgtactggtgacagatgcgcttgtattgttcgtgctgctcaggcattagtttaaaagaggttctaagttcgttatccagcctgtacttctccatcagcagacacatcacttccatgcctttctcccaagcagacaccaggggcaagctaatcggattcttaacagtgcaggcagcagctcctttagccagagggtcatctttggcgatcttctcaatgcttcttttgccatccttctcaacgatgcgcacgggcgggtagctgaaacccactgctacaagttgcgcctcttctctttcttcttcgctgtcttgactgatgtcttgcatggggacatgtttggtcttccttggcttctttttcgggggtatcggaggaggaggactgtcgctccgttccggagacagggaggattgtgacgtttcgctcaccattaccaactgactgtcggtagaagaacctgaccccacacggcgacaggtgtttctcttcgggggcagaggtggaggcgattgcgaagggctgcggtccgacctggaaggcggatgactggcagaaccccttccgcgttcgggggtgtgctccctgtggcggtcgcttaactgatttccttcgcggctggccattgtgttctcctaggcagagaaacaacagacatggaaactcagccattgctgtcaacatcgccacgagtgccatcacatctcgtcctcagcgacgaggaaaaggagcagagcttaagcattccaccgcccagtcctgccaccacctctaccctagaagataaggaggtcgacgcatctcatgacatgcagaataaaaaagcgaaagagtctgagccagacatcgaacaagacccgggctatgtgacaccggtggaacacgaggaagagttgaaacgctttctagagagagaggatgaaaactgcccaaaacagcaagcggataactatcaccaagatgctggaaatagggatcagaacaccgactacctcatagggcttgacggggaagacgcgctccttaaacatctagcaagacagtcactcatagtcaaggatgcattattggacagaactgaagtgcccatcagtgtcgaagagctcagccgcgcctacgagcttaacctattttcacctcgtactccccccaaacgtcagccaaacggcacctgcgagccaaatcctcgcttaaacttttatccagcttttgctgtgccagaagtactggctacctatcacatcttttttaaaaatcaaaaaattccagtctcctgccgcgctaatcgcacccgcgccgatgccctactcaatctgggacctggttcacgcttacctgatatagcttccttggaagaggttccaaagatcttcgagggtctgggcaataatgagactcgggccgcaaatgctctgcaaaagggagaaaatggcatggatgagcatcacagcgttctggtggaattggaaggcgataatgccagactcgcagtactcaagcgaagcgtcgaggtcacacactttgcataccccgctgtcaacctgccccctaaagtcatgacggccgtcatggaccagttactcattaagcgcgcaagtcccctttcagaagacatgcatgacccagatgcctgtgatgagggtaaaccagtggtcagtgatgagcagctaacccgatggctgggcaccgactctccccgggatttggaagagcgtcgcaagcttatgatggccgtggtgctggttaccgtagaactagagtgtcttcggcgtttctttaccgattcagaaaccttgcgcaaactcgaagagaatctgcactacacttttagacacggctttgtgcggcaggcatgcaagatatctaacgtggaactcaccaacctggtttcctacatgggtattctgcatgagaatcgcctaggacaaagcgtgctgcacagcacccttaagggggaagcccgccgtgattacatccgcgattgtgtttatctctacctgtgccacacgtggcaaaccggcatgggtgtatggcagcaatgtttagaagaacagaacctgaaagagctaaacaagctcttacagaaatctcttaaggttctgtggacagggttcgacgagcgcaccgtcgcttccgacctggcagacctcatcttcccagagcgtctcagggttactttgcgaaacggactgcctgactttatgagccagagcatgcttaacaattttcgctctttcatcctggaacgctccggtatcctgcccgccacctgctgcgcactgccctccgactttgtgcctctcacctaccgcgaatgccccccgccgctatggagtcactgctacctgttccgtctggccaactacctctcctaccactcggatgtgatcgaggatgtgagcggagacggcttgctggagtgtcactgccgctgcaatctgtgcacgccccaccggtccctagcttgcaacccccagttgatgagcgaaacccagataataggcacctttgaattgcaaggccccagcagccaaggcgatgggtcttctcctgggcaaagtttaaaactgaccccgggactgtggacctccgcctacttgcgcaagtttgccccggaagattaccacccctatgaaatcaagttctatgaggaccaatcacagcctccgaaagccgaactttcggcctgcgtcatcacccagggggcaattctggcccaattgcaagccatccaaaaatcccgccaagaatttctactgaaaaagggtaagggggtctaccttgacccccagaccggcgaggaactcaacacaaggttccctcaggatgtcccaacgacgagaaagcaagaagttgaaggtgcagccgccgcccccagaagatatggaggaagattgggacagtcaggcagaggaagcggaggaggaggacagtctggaggacagtctggaggaagacagtttggaggaggaaaacgaggaggcagaggaggtggaagaagtaaccgccgacaaacagttatcctcggctgcggagacaagcaacagcgctaccatctccgctccgagtcgaggaacccggcggcgtcccagcagtagatgggacgagaccggacgcttcccgaacccaaccagcgcttccaagaccggtaagaaggatcggcagggatacaagtcctggcgggggcataagaatgccatcatctcctgcttgcatgagtgcgggggcaacatatccttcacgcggcgctacttgctattccaccatggggtgaactttccgcgcaatgttttgcattactaccgtcacctccacagcccctactatagccagcaaatcccggcagtctcgacagataaagacagcggcggcgacctccaacagaaaaccagcagcggcagttagaaaatacacaacaagtgcagcaacaggaggattaaagattacagccaacgagccagcgcaaacccgagagttaagaaatcggatctttccaaccctgtatgccatcttccagcagagtcggggccaagagcaggaactgaaaataaaaaaccgatctctgcgttcgctcaccagaagttgtttgtatcacaagagcgaagatcaacttcagcgcactctcgaggacgccgaggctctcttcaacaagtactgcgcgctgactcttaaagagtaggcagcgaccgcgcttattcaaaaaaggcgggaattacatcatcctcgacatgagtaaagaaattcccacgccttacatgtggagttatcagccccaaatgggattggcggcaggcgcctcccaggactactccacccgcatgaattggctcagcgccgggccttctatgatttctcgagttaatgatatacgcgcctaccgaaaccaaatacttttggaacagtcagctcttaccaccacgccccgccaacaccttaatcccagaaattggcccgccgccctagtgtaccaggaaagtcccgctcccaccactgtattacttcctcgagacgcccaggccgaagtccaaatgactaatgcaggtgcgcagttagcgggcggctccaccctatgtcgtcacaggcctcggcataatataaaacgcctgatgatcagaggccgaggtatccagctcaacgacgagtcggtgagctctccgcttggtctacgaccagacggaatctttcagattgccggctgcgggagatcttccttcacccctcgtcaggctgttctgactttggaaagttcgtcttcgcaaccccgctcgggcggaatcgggaccgttcaatttgtggaggagtttactccctctgtctacttcaaccccttctccggatctcctgggcactacccggacgagttcataccgaacttcgacgcgattagcgagtcagtggacggctacgattgatgtctggtgacgcggctgagctatctcggctgcgacatctagaccactgccgccgctttcgctgctttgcccgggaactcattgagttcatctacttcgaactccccaaggatcaccctcaaggtccggcccacggagtgcggattactatcgaaggcaaaatacactctcgcctgcaacgaattttctcccagcggcccgtgctgatcgagcgagaccagggaaacaccacggtttccatctactgcatttgtaatcaccccggattgcatgaaagcctttgctgtcttatgtgtactgagtttaataaaaactgaattaagactctcctacggactgccgcttcttcaacccggattttacaaccagaagaacgaaacttttcctgtcgtccaggactctgttaacttcacctttcctactcacaaactagaagctcaacgactacaccgcttttccagaagcattttccctactaatactactttcaaaaccggaggtgagctccaaggtcttcctacagaaaacccttgggtggaagcgggccttgtagtgctaggaattcttgcgggtgggcttgtgattattctttgctacctatacacaccttgcttcactttcctagtggtgttgtggtattggtttaaaaaatggggcccatactagtcttgcttgttttactttcgcttttggaaccgggttctgccaattacgatccatgtctagacttcgacccagaaaactgcacacttacttttgcacccgacacaagccgcatctgtggagttcttattaagtgcggatgggaatgcaggtccgttgaaattacacacaataacaaaacctggaacaataccttatccaccacatgggagccaggagttcccgagtggtacactgtctctgtccgaggtcctgacggttccatccgcattagtaacaacactttcattttttctgaaatgtgcgatctggccatgttcatgagcaaacagtattctctatggcctcctagcaaggacaacatcgtaacgttctccattgcttattgcttgtgcgcttgccttcttactgctttactgtgcgtatgcatacacctgcttgtaaccactcgcatcaaaaacgccaataacaaagaaaaaatgccttaacctctttctgtttacagacatggcttctcttacatctctcatatttgtcagcattgtcactgccgctcacggacaaacagtcgtctctatccctctaggacataattacactctcataggacccccaatcacttcagaggtcatctggaccaaactgggaagcgttgattactttgatataatctgcaacaaaacaaaaccaataatagtaacttgcaacatacaaaatcttacattgattaatgttagcaaagtttacagcggttactattatggttatgacagatacagtagtcaatatagaaattacttggttcgtgttacccagttaaaaaccacgaaaatgccaaatatggcaaagattcgatccgatgacaattctctagaaacttttacatctcccaccacacccgacgaaaaaaacatcccagattcaatgattgcaattgttgcagcggtggcagtggtgatggcactaataataatatgcatgcttttatatgcttgtcgctacaaaaagtttcatcctaaaaaacaagatctcctactaaggcttaacatttaatttctttttatacagccatggtttccactaccacattccttatgcttactagtcttgcaactctgacttctgctcgctcacacctcactgtaactataggctcaaactgcacactaaaaggacctcaaggtggtcatgtcttttggtggagaatatatgacaatggatggtttacaaaaccatgtgaccaacctggtagatttttctgcaacggcagagacctaaccattatcaacgtgacagcaaatgacaaaggcttctattatggaaccgactataaaagtagtttagattataacattattgtactgccatctaccactccagcaccccgcacaactactttctctagcagcagtgtcgctaacaatacaatttccaatccaacctttgccgcgcttttaaaacgcactgtgaataattctacaacttcacatacaacaatttccacttcaacaatcagcattatcgctgcagtgacaattggaatatctattcttgtttttaccataacctactacgcctgctgctatagaaaagacaaacataaaggtgatccattacttagatttgatatttaatttgttctttttttttttatttacagtatggtgaacaccaatcatggtacctagaaatttcttcttcaccatactcatttgtgcatttaatgtttgcgctactttcacagcagtagccacagcaaccccagactgtataggagcatttgcttcctatgcactttttgcttttgttacttgcatctgcgtatgtagcatagtctgcctggttattaattttttccaacttctagactggatccttgtgcgaattgcctacctgcgccaccatcccgaataccgcaaccaaaatatcgcggcacttcttagactcatctaaaaccatgcaggctatactaccaatatttttgcttctattgcttccctacgctgtctcaaccccagctgcctatagtactccaccagaacaccttagaaaatgcaaattccaacaaccgtggtcatttcttgcttgctatcgagaaaaatcagaaattcccccaaatttaataatgattgctggaataattaatataatctgttgcaccataatttcatttttgatataccccctatttgattttggctggaatgctcccaatgcacatgatcatccacaagacccagaggaacacattcccctacaaaacatgcaacatccaatagcgctaatagattacgaaagtgaaccacaacccccactactccctgctattagttacttcaacctaaccggcggagatgactgaaacactcaccacctccaattccgccgaggatctgctcgatatggacggccgcgtctcagaacagcgacttgcccaactacgcatccgccagcagcaggaacgcgcggccaaagagctcagagatgtcatccaaattcaccaatgcaaaaaaggcatattctgtttggtaaaacaagccaagatatcctacgagatcaccgctactgaccatcgcctctcttacgaacttggcccccaacgacaaaaatttacctgcatggtgggaatcaaccccatagttatcacccagcaaagtggagatactaagggttgcattcactgctcctgcgattccatcgagtgcacctacaccctgctgaagaccctatgcggcctaagagacctgctaccaatgaattaaaaaatgattaataaaaaatcacttacttgaaatcagcaataaggtctctgttgaaattttctcccagcagcacctcacttccctcttcccaactctggtattctaaaccccgttcagcggcatactttctccatactttaaaggggatgtcaaattttagctcctctcctgtacccacaatcttcatgtctttcttcccagatgaccaagagagtccggctcagtgactccttcaaccctgtctacccctatgaagatgaaagcacctcccaacacccctttataaacccagggtttatttccccaaatggcttcacacaaagcccagacggagttcttactttaaaatgtttaaccccactaacaaccacaggcggatctctacagctaaaagtgggagggggacttacagtggatgacactgatggtaccttacaagaaaacatacgtgctacagcacccattactaaaaataatcactctgtagaactatccattggaaatggattagaaactcaaaacaataaactatgtgccaaattgggaaatgggttaaaatttaacaacggtgacatttgtataaaggatagtattaacaccttatggactggaataaaccctccacctaactgtcaaattgtggaaaacactaatacaaatgatggcaaacttactttagtattagtaaaaaacggagggcttgttaatggctacgtgtctctagttggtgtatcagacactgtgaaccaaatgttcacacaaaagacagcaaacatccaattaagattatattttgactcttctggaaatctattaactgatgaatcagacttaaaaattccacttaaaaataaatcttctacagcgaccagtgaaactgtagccagcagcaaagcctttatgccaagtactacagcttatcccttcaacaccactactagggatagtgaaaactacattcatggaatatgttactacatgactagttatgatagaagtctatttcccttgaacatttctataatgctaaacagccgtatgatttcttccaatgttgcctatgccatacaatttgaatggaatctaaatgcaagtgaatctccagaaagcaacatagctacgctgaccacatccccctttttcttttcttacattacagaagacgacaactaaaataaagtttaagtgtttttatttaaaatcacaaaattcgagtagttattttgcctccaccttcccatttgacagaatacaccaatctctccccacgcacagctttaaacatttggataccattagagatagacattgttttagattccacattccaaacagtttcagagcgagccaatctggggtcagtgatagataaaaatccatcgcgatagtcttttaaagcgctttcacagtccaactgctgcggatgcgaatccggagtctggatcacggtcatctggaagaagaacgatgggaatcataatccgaaaacggtatcggacgattgtgtctcatcaaacccacaagcagccgctgtctgcgtcgctccgtgcaactgctgtttatgggatcagggtccacagtgtcctgaagcatgattttaatagcccttaacatcaactttctggtgcgatgcgcgcagcaacgcattctgatttcactcaaatctttgcagtaggtacaacacattattacaatattgtttaataaaccataattaaaagcgctccagccaaaactcatatctgatataatcgcccctgcatgaccatcataccaaagtttaatataaattaaatgacgttccctcaaaaacacactacccacatacatgatctcttttggcatgtgcatattaacaatctgtctgtaccatggacaacgttggttaatcatgcaacccaatataaccttccggaaccacactgccaacaccgctcccccagccatgcattgaagtgaaccctgctgattacaatgacaatgaagaacccaattctctcgaccgtgaatcacttgagaatgaaaaatatctatagtggcacaacatagacataaatgcatgcatcttctcataatttttaactcctcaggatttagaaacatatcccagggaataggaagctcttgcagaacagtaaagctggcagaacaaggaagaccacgaacacaacttacactatgcatagtcatagtatcacaatctggcaacagcgggtggtcttcagtcatagaagctcgggtttcattttcctcacaacgtggtaactgggctctggtgtaagggtgatgtctggcgcatgatgtcgagcgtgcgcgcaaccttgtcataatggagttgcttcctgacattctcgtattttgtatagcaaaacgcggccctggcagaacacactcttcttcgccttctatcctgccgcttagcgtgttccgtgtgatagttcaagtacagccacactcttaagttggtcaaaagaatgctggcttcagttgtaatcaaaactccatcgcatctaattgttctgaggaaatcatccacggtagcatatgcaaatcccaaccaagcaatgcaactggattgcgtttcaagcaggagaggagagggaagagacggaagaaccatgttaatttttattccaaacgatctcgcagtacttcaaattgtagatcgcgcagatggcatctctcgcccccactgtgttggtgaaaaagcacagctaaatcaaaagaaatgcgattttcaaggtgctcaacggtggcttccaacaaagcctccacgcgcacatccaagaacaaaagaataccaaaagaaggagcattttctaactcctcaatcatcatattacattcctgcaccattcccagataattttcagctttccagccttgaattattcgtgtcagttcttgtggtaaatccaatccacacattacaaacaggtcccggagggcgccctccaccaccattcttaaacacaccctcataatgacaaaatatcttgctcctgtgtcacctgtagcgaattgagaatggcaacatcaattgacatgcccttggctctaagttcttctttaagttctagttgtaaaaactctctcatattatcaccaaactgcttagccagaagccccccgggaacaagagcaggggacgctacagtgcagtacaagcgcagacctccccaattggctccagcaaaaacaagattggaataagcatattgggaaccgccagtaatatcatcgaagttgctggaaatataatcaggcagagtttcttgtaaaaattgaataaaagaaaaatttgccaaaaaaacattcaaaacctctgggatgcaaatgcaataggttaccgcgctgcgctccaacattgttagttttgaattagtctgcaaaaataaaaaaaaaaacaagcgtcatatcatagtagcctgacgaacaggtggataaatcagtctttccatcacaagacaagccacagggtctccagctcgaccctcgtaaaacctgtcatggtgattaaacaacagcaccgaaagttcctcgcggtgaccagcatgaataattcttgatgaagcatacaatccagacatgttagcatcagttaacgagaaaaaacagccaacatagcctttgggtataattatgcttaatcgtaagtatagcaaagccacccctcgcggatacaaagtaaaaggcacaggagaataaaaaatataattatttctctgctgctgttcaggcaacgtcgcccccggtccctctaaatacacatacaaagcctcatcagccatggcttaccagacaaagtacagcgggcacgcacaagctctaaagtcactctccaacctctccacaatatatatacacaagccctaaactgacgtaatgggagtaaagtgtaaaaaatcccgccaaacccaacacacaccccgaaactgcgtcaccagggaaaagtacagtttcacttccgcaatcccaacaagcgtcacttcctctttctcacggtacgtcacatcccattaacttgcaacgtcattttcccacggccgcgccgccccgtttagccgttaaccccacagccaatcaccacacaccccacaatttttaaaatcacctcatttacatattggcaccattccatctataaggtatattattgatgatg

SEQ ID NO: 206 - DNA, 35213 bp, Unknown
  Description of Unknown: Human adenovirus D37 sequence
catcatcataatataccccacaaagtaaacaaaagttaatatgcaaatgagcttttgaattttaacggttttggggcggagccaacgctgattggacgagaagcggtgatgcaaataacgtcacgacgcacggctaacggccggcgcggaggcgtggcctaggccggaagcaagtcgcggggctaatgacgtataaaaaagcggactttagacccggaaacggccgattttcccgcggccacgcccggatatgaggtaattctgggcggatgcaagtgaaattaggtcattttggcgccaaaactgaatgaggaagtgaaaagtgaaaaatacctgtcccgcccagggcggaatatttaccgagggccgagagactttgaccgattacgtggggtttcgattgcggtgtttttttcgcgaatttccgcgtccgtgtgaaagtccggtgtttatgtcacagatcagctgatccacagggtatttaaaccagttgagcccgtcaagaggccactcttgagtgccagcgagtagagatttctctgagctccgctcccaaagtgtgagaaaaatgagacacctgcgcctcctgtcttcaactgtgcctattaacatggccgcattattgctggaggactatgtgagtacagtattggaggacgaactacatccatctccatttgagctgggacctacacttcaggacctttatgatttggaggtagatgcccatgatgacgacccaaacgaagaggctgtgaatttaatatttccagaatctctgattcttcaggctgacatagccagcgaagctgtacctacaccacttcatacaccgactttgtcacccatacctgaattggaagaggaggacgagttagacctccgatgttatgaggaaggttttcctcccagcgattcagaggacgaacagggtgagcagagcatggctctaatctcagaatatgcttgtgtggttgtggaagagcattttgtgttggacaatcctgaggtgcccgggcaaggctgtagatcctgccagtaccaccgggataagaccggagacacaaacgcctcctgcgctctgtgttacatgaaaaagaacttcagctttatttacagtaagtggagtgaatgtgagagaggctgagtgcttaacacataactgggtgatgcttaaacagctgtgctaagtgtggtttatttttgtttctaggtccggtgtcagaggatgagtcatcaccctcagaagaaaaccacccgtgtccccctgagctgtcaggcgaaacgcccctgcaagtgcacaaacccaccccagtcagacccagtggcgagaggcgagcagctgttgaaaaaattgaggacttgttacatgacatgggtggggatgaacctttggacctgagcttgaaacgccccaggaactaggcgcagctgtgcttagtcatgtgtaaataaagttgtacaataaaagtatatgtgacgcatgcaaggtgtggtttatgactcatgggcggggcttagtcctatataagtggcaacacctgggcactgggcacagaccttcagggagttcctgatggatgtgtggactatccttgcagactttagcaagacacgccggcttgtagaggatagttcagacgggtgctccgggttctggagacactggtttggaactcctctatctcgactggtgtacacagttaagaaggattataacgaggaatttgaaaatctttttgctgattgctctggcctgctagattctctgaatctcggccaccagtcccttttccaggaaagggtactccacagccttgatttttccagcccagggcgcactacagccggggttgcttttgtggtttttctggttgacaaatggagccagaacacccaactgagcaggggctacattctggacttcgcagccatgcacctgtggagggcatgggtgaggcagcggggacagagaatcttgaactactggcttatacagccagcagctccgggtcttcttcgtctacacagacaaacatccatgttggaggaagaaatgaggcaggccatggacgagaacccgaggagcggcctggaccctccgtcggaagaggagctggattgaatcaggtatccagcttgtacccagagcttagcaaggtgctgacatccatggctaggggagtgaagagggagaggagcgatgggggcaataccgggatgatgaccgagctgacggccagcctgatgaatcgcaagcgcccagagcgcattacctggcacgagctacagatggagtgcagggatgagttgggcctgatgcaggataaatatggcctggagcagataaaaacacattggttgaacccagatgaggattgggaggaggccattaagaaatatgccaagatagccctgcgcccagattgcaagtacatagtgaccaagaccgtgaatattagacatgcctgctacatttcagggaacggggcagaggtggtcatcgataccctggacaaggccgccttcaggtgttgcatgatgggaatgagagcaggagtgatgaatatgaattccatgatcttcatgaacatgaagttcaatggagagaagtttaatggggtgctgttcatggccaacagccacatgaccctgcatggctgcagtttctttggcttcaacaatatgtgcgccgaggtctggggcgcttccaagatcaggggatgtaagttttatggctgctggatgggcgtggtcggaagacctaagagcgagatgtctgtgaagcagtgtgtgtttgagaaatgctacctgggagtctctaccgagggcaatgctagagtgagacactgctcttccctggatacgggctgcttctgcctggtgaagggtacggcctctctgaagcataatatggtgaagggctgcacagatgagcgcatgtacaacatgctaacatgcgactcgggggtctgtcatatcctgaagaacatccatgtgacctcccaccccagaaagaagtggccagtgtttgagaataacctgctgatcaagtgccatatgcacctgggtgccagaaggggcaccttccagccgtaccagtgcaactttagccagaccaagctgctgttggaaaacgatgccttctccagggtgaacctgaacggcatctttgacatggatgtctcggtgtacaagatcctgagatacgatgagaccaagtccagggtgcgcgcttgcgagtgcgggggcagacacaccaggatgcagccagtggccctggatgtgaccgaggagctgagaccagaccacctggtgatggcctgtaccgggaccgagttcagctccagtggggaggacacagattagaggtaggtttgagtagtgggcgtggctaatgtgagtataaaggcgggtgtcttacgagggtctttttgcttttctgcagacatcatgaacgggaccggcggggccttcgaaggggggctttttagcccttatttgacaacccgcctgccgggatgggccggagttcgtcagaatgtgatgggatctacggtggatgggcgtccagtgcttccagcaaattcctcgaccatgacctacgcgaccgtggggagctcgtcgcttgacagcaccgccgcagccgcggcagccgcagccgccatgacagcgacgagactggcctcgagctatatgcccagcagcggtagcagcccctctgtgcccagttccatcatcgccgaggagaaactgctggccctgctggccgagctggaagccctgagccgccagctggccgccctgacccagcaggtgtccgatctccgcgagcaacagcagcagcaaaataaatgattcaataaacacagattctgattcaaacagcaaagcatctttattatttattttttcgcgcgcggtaggccctggtccacctctcccgatcattgagagtgcggtggattttttccaggacccggtagaggtgggattggatgttgaggtacatgggcatgagcccgtcccgggggtggaggtagcaccactgcatggcctcgtgctctggggtcgtgttgtagataatccagtcatagcaggggcgctgggcgtggtgctggatgatgtccttgaggaggagactgatggccacggggagccccttggtgtaggtgttggcaaagcggttaagctgggagggatgcatgcggggggagatgatgtgcagtttggcctggatcttgaggttggcgatgttgccacccagatcccgccgggggttcatattgtgcaggaccaccagaacggtgtagcccgtgcacttggggaacttatcatgcaacttggaagggaatgcgtggaagaatttggagacgcccttgtgcccgcccaggttttccatgcactcatccatgatgatggcaatgggcccgtgggctgcggctttggcaaaaacgtttctggggtcagagacatcataattatgctcctgggtgagatcatcataagacattttaatgaatttggggcgaagggtgccagattgggggacgatcgttccctcgggccccggggcgaagttcccctcgcagatctgcatctcccaggctttcatctcggagggggggatcatgtccacctgcggggcgatgaaaaaaacggtttccggggcgggggtgatgagctgcgaggagagcaggtttcttaacagctgggacttgccgcacccggtcgggccgtagatgaccccgatgacgggttgcaggtggtagttcaaggagatgcagctgccgtcgtcccggaggaggggggccacctcgttgagcatgtctctcacttggaggttttcccggacgagctcgccgaggaggcggtccccgcccagcgagagcagctcttgcagggaagcaaagtttttcaggggcttgagcccgtcggccatgggcatcttggcaagggtctgcgagaggagctccaggcggtcccatagctcggtgacgtgctctacggcatctcgatccagcagacttcctcgtttcgggggttgggacgactgcgactgtagggcacgagacgatgggcgtccagcgcggccagcgtcatgtccttccagggtctcagggtccgagtgagggtggtctccgtcacggtgaaggggtgggccccgggctgggcgcttgcaagggtgcgcttgagactcatcctgctggtgctgaaacgggcacggtcttcgccctgcgcgtcggcgagatagcagttgaccatgagcttgtagttaagggcctcggcggcgtggcccttggcacggagcttgcctttggaagagcgcccgcaggcgggacagaggagggattgcagggcgtagagcttgggtgcgagaaagacggactcgggagcgaaggcgtccgctccgcagtgggcgcagacggtttcgcactcgacgagccaggtgagctcgggctgctcggggtcaaaaaccagttttcccccgttctttttgatgcgcttcttacctcgcgtctccatgagtctgtgtccgcgttcggtgacaaacaggctgtctgtgtccccgtagacggacttgattggcctgtcctgcaggggcgtcccgcggtcctcctcgtagagaaactcggaccactctgagacaaaggcgcgcgtccacgccaagacaaaggaggccacgtgcgaggggtagcggtcgttgtccaccagggggtccaccttttccaccgtgtgcagacacatgtccccctcctccgcatccaagaaggtgattggcttgtaggtgtaggccacgtgaccgggggtccccgacgggggggtataaaagggggcgggtctgtgctcgtcctcactctcttccgcgtcgctgtccacgagcgccagctgttggggtaggtattccctctcgagagcgggcatgacctcggcactcaggttgtcagtttctagaaacgaggaggatttgatgttggcctgccctgccgcaatgctttttaggagactttcatccatctggtcagaaaagactatttttttattgtcaagcttggtggcaaaggagccatagagggcgttggagagaagcttggcgatggatctcatggtctgatttttgtcacggtcggcgcgctccttggccgcgatgttgagctggacatactcgcgcgcgacacacttccattctgggaagacggtggtgcgctcgtcgggcacgatcctgacgcgccagccgcgattatgcagggtgaccaggtccacgctggtggccacctcgccgcgcaggggctcgttggtccagcagaggcgtccgcccttgcgcgagcagaacgggggcagcacatcaagcagatgctcgtcaggggggtccgcatcgatggtgaagatgcccggacagagttccttgtcaaaataatcgatttttgaggatgcatcatccaaggccatctgccactcgcgggcggccagcgctcgctcgtaggggttgaggggcggaccccagggcatgggatgcgtgagggcggaggcgtacatgccgcagatgtcgtagacatagatgggctccgagaggatgccgatgtaggtgggataacagcgccccccgcggatgctggcgcgcacatagtcatacaactcgtgcgagggggccaagaaagcggggccgagattggtgcgctggggctgctcggcgcggaagacgatctggcgaaagatggcatgcgagttggaggagatggtgggccgttggaagatgttaaagtgggcgtggggcaagcggaccgagtcgcggatgaagtgcgcgtaggagtcttgcagcttggcaacgagctcggcggtgacaaggacgtccatggcgcagtagtccagcgtttcacggatgatgtcataacccgcctcttctttcttctcccacagcgcgcggttgagggcgtactcctcgtcatccttccagtactcccggagcgggaatcctcgatcgtccgcacggtaagagcccagcatgtagaaatggttcacggccttgtagggacagcagcccttctccacggggagggcgtaagcttgagcggccttgcggagcgaggtgtgcgtcagggcgaaggtatccctaaccatgactttcaagaactggtacttgaaatccgagtcgtcgcagccgccgtgctcccagagctcgaaatcggtgcgcttcttcgagagggggttaggcagagcgaaagtgacgtcattgaagagaatcttgcctgcccgcggcatgaaattgcgggtgatgcggaaagggcccggaacggaggctcggttgttgatgacctgggcggcgaggacgatctcgtcgaagccgttgatgttgtgcccgacgatgtagagttccatgaatcgcgggcggcctttgatgtgcggcagctttttgagttcctcgtaggtgaggtcctcggggcattgcaggccgtgctgctcgagcgcccactcctggagatgtgggttggcttgcatgaatgaagcccagagctcgcgggccatgagggtctggagctcgtcgcgaaagaggcggaactgctggcccacggccatcttttctggggtgacgcagtagaaggtgagggggtcccgctcccagcgatcccagcgtaagcgcacggcgagatcgcgagcgagggcgaccagctcggggtccccggagaatttcatgaccagcatgaaggggacgagctgcttgccgaaggaccccatccaggtgtaggtttctacatcgtaggtgacaaagagccgctccgtgcgaggatgagagccgattgggaagaactggatttcctgccaccagttggtcgagtggctgttgatgtgatgaaagtagaaatcccgccggcgaaccgagcactcgtgctgatgcttgtaaaagcgtccgcagtactcgcagcgctgcacgggctgtacctcatccacgagatacacagcgcgtcccttgaggaggaacttcaggagtggcggccctggctggtggttttcatgttcgcctgcgtgggactcaccctggggctcctcgaggacggagaggctgacgagcccgcgcgggagccaggtccagatctcggcgcggcgggggcggagagcgaaaacgagggcgcgcagttgggagctgtccatggtgtcgcggagatccaggtccgggggcagggttctgaggttgacctcgtagaggcgggtgagggcgtgcttgagatgcagatggtacttgatctccacgggtgagttggtggtcgtgtccacgcattgcatgagcccgtagctgcgcggggccacgaccgtgccgcggtgcgcttttagaagcggtgtcgcggacgcgctcccggcggcagcggcggttccggccccgcgggcagtggcggtagaggcacgtcggcgtggcgctcgggcaggtcccggtgctgcgccctgagagcgctggcgtgcgcgacgacgcggcggttgacatcctggatctgccgcctttgcgtgaagaccacgggccccgtgactttgaacctgaaagacagttcaacagaatcaatctcggcgtcattgacggcggcctgacgcaggatctcttgcacgtcgcccgagttgtcctggtaggcgatctcggacatgaactgctcgatttcctcctcctggagatcgccgcggcccgcgcgctctacggtggcggcaaggtcattcgagatgcgacccatgagctgcgagaaggcgcccaggccgctctcgttccagacgcggctgtaaaccacgtccccgtcggcgtcgcgcgcgcgcatgaccacctgcgcgaggttgagctccacgtgccgcgcgaagacggcatagttgcgcaggcgttggaagaggtagttgagggtggtggcgatgtgctcggtgacgaagaagtacataatccagcggcgcaggggcatttcgctgatgtcgccaatggcctccagcctttccatggcctcgtagaaatccacggcgaagttgaaaaactgggcgttgcgggccgagaccgtgagctcgtcttccaggagcctgatgagttcggcgatggtggcgcgcacctcgcgctcgaaatccccgggggcctcctcctcttcctcttcttccatgacgacctcttcttctatttcttcctctgggggcggtggtggtggcggggcccgacgacgacggcgacgcaccgggagacggtcgacgaagcgctcgatcatctccccgcggcggcgacgcatggtttcggtgacggcgcgaccccgttcgcgaggacgcagcgtgaagacgccgccggtcatctcccggtaatggggtgggtccccgttgggcagcgatagggcgctgacaatgcatcttatcaattgcggtgtagggcacgtgagcgcgtcgagatcgaccggatcggagaatctttcgaggaaagcgtctagccaatcgcagtcgcaaggtaagctcaaacacgtagcagccctgtggacgctgttagaattgcggttgctgatgatgtaattgaagtaggcgtttttgaggcggcggatggtggcgaggaggaccaggtccttgggtcccgcttgctggatgcggagccgctcggccatgccccaggcctggccctgacaccggctcaggttcttgtagtagtcatgcatgagcctctcgatgtcatcactggcggaggcggagtcttccatgcgggtgaccccgacgcccctgaacggctgcacgagcgccaggtcggcgacgacgcgctcggcgaggatggcctgttgcacgcgggtgagggtgtcctggaagtcgtccatgtcgacgaagcggtggtaggcccctgtgttgatggtgtaagtgcagttggccataagcgaccagttgacggtctgcaggccgggttgcacgacctcggagtacctgagccgcgagaaggcgcgcgagtcgaagacatagtcgttgcaggtgcgcacgaggtactggtatccgactagaaagtgcggcggcggctggcggtagagcggccagcgctgggtggccggcgcgcccggggccaggtcctcaagcatgagtcggtggtagccgtagaggtagcgggacatccaggtgatgccggcggcggtggtggaggcgcgcgggaactcgcggacgcggttccagatgttgcgcaggggcaggaaatagtccatggtcggcacggtctggccggtgagacgcgcgcagtcattgatgctctagaggcaaaaacgaaagcggttgagcgggctcttcctccgtagcctggcggaacgcaaacgggttaggccgcgtgtgtaccccggttcgagtcccctcgaatcaggctggagccgcgactaacgtggtattggcactcccgtctcgacccaagcccgatagccgccaggatacggcggagagccctttttgtcggccgaggggagtcgctagacttgaaagcggccgaaaaccctgccgggtagtggctcgcgcccgtagtctggagaagcatcgccagggttgagtcgcggcagaacccggttcaaggacggccgcggcgagcgggacttggtcaccccgccgatttaaagacccacagccagccgacttctccagttacgggagcgagcccccttttttctttttgccagatgcatcccgtcctgcgccaaatgcgtcccacccccccggcgaccaccgcgaccgcggccgtagcaggcgccggcgctagccagccacagccacagacagagatggacttggaagagggcgaagggctggcgagactgggggcgccgtccccggagcgacatccccgcgtgcagctgcagaaggacgtgcgcccggcgtacgtgcctgcgcagaacctgttcagggaccgcagcggggaggagcccgaggagatgcgcgactgccggtttcgggcgggcagggagctgcgcgagggcctggaccgccagcgcgtgctgcgcgacgaggatttcgagccgaacgagcagacggggatcagccccgcgcgcgcgcacgtggcggcggccaacctggtgacggcctacgagcagacggtgaagcaggagcgcaacttccaaaagagtttcaacaaccacgtgcgcaccctgatcgcgcgcgaggaggtggccctgggcctgatgcacctgtgggacctggcggaggccatcgtgcagaacccggacagcaagcctctgacggcacagctgttcctggtggtgcagcacagcagggacaacgaggcgttcagggaggcactgctgaacatcgccgagcccgagggtcgctggctgctggagctgattaacatcttgcagagcatcgtagtgcaggagcgcagcctgagcctggccgagaaggtggcggcgatcaactactcggtgctgagcctgggcaagttttacgcgcgcaagatttacaagacgccgtatgtgcccatagacaaggaggtgaagatagacagcttttacatgcgcatggcgctcaaggtgctgacgctgagcgacgacctgggcgtgtaccgcaacgaccgcatccacaaggccgtgagcacaagccggcggcgcgagctgagcgaccgcgagctgatgctgagtctgcgccgggcgctggtaggaggcgccaccggcggtgaggagtcctactttgacatgggggcggacctgcattggcagccgagccgacgcgccttggaggccgcctacggtccagaggacttggatgaggaagaggaagaggaggaggatgcacccgttgcggggtactgacgcctccgtgatgtgtttttagatgcagcaagccccggaccccgccataagggcggcgctgcaaagccagccgtccggtctagcatcggacgactgggaggccgcgatgcaacgcatcatggccctgacgacccgcaaccccgagtcctttagacaacagccgcaggccaacagactctcggccattctggaggcggtggttccttctcggaccaaccccacgcacgagaaggtgctggcgatcgtgaacgcgctggcggagaacaaggccatccgtcccgacgaggccgggctagtgtacaacgccctgctggagcgcgtgggccgctacaacagcacaaacgtgcagtccaacctggaccggctggtgacggacgtgcgcgaggccgtggcgcagcgcgagcggttcaagaacgagggcctgggttcgctggtggcgctgaacgccttcctggcgacgcagccggcgaacgtgccgcgcgggcaggatgattataccaactttataagcgcgctgcggctgatggtgaccgaggtgccccagagcgaggtgtaccagtcgggcccggactactttttccagacgagcagacagggcctgcagacggtgaacctgagtcaggctttcaagaacctgcgcgggctgtggggcgtgcaggcgcccgtgggcgaccggtcgacggtgagcagcttgctgacgcccaactcgcggctgctgctgctgctgatcgcgcccttcaccgacagtggcagcgtgaaccgcaactcgtacctgggtcacctgctgacgctgtaccgcgaggccataggccaggcgcaggtggatgagcagaccttccaggagatcactagcgtgagccgcgcgctgggtcagaacgacaccgacagtctgagggccaccctgaacttcttgctgaccaatagacagcagaagatcccggcgcagtacgcgctgtcggccgaggaggagcgcatcctgagatatgtgcagcagagcgtagggctgttcctgatgcaggagggggccacccccagcgccgcgctggacatgaccgcgcgcaacatggaacctagcatgtacgccgccaaccggccgtttattaataagctgatggactacctgcaccgcgcggcgtccatgaactcggactactttaccaatgccatcttgaacccgcactggctcccgccgccggggttctacacgggcgagtacgacatgcctgaccccaacgacgggtttttgtgggacgacgtggacagcgcggtgttctcaccgaccttgcaaaagcgccaggaggcggtgcgcacgcccgcgagcgagggcgcggtgggtcggagcccctttcctagcttagggagtttgcatagcttgccgggctcggtgaacagcggcagggtgagccggccgcgcttgctgggcgaggacgagtacctgaacgactcgctgctgcagccgccgcgggtcaagaacgccatggtcaataacgggatagagagtctggtggacaaactgaaccgctggaaaacctacgctcaggaccatagggaacctgcgcccgcgccgcggcgacagcgtcacgaccggcagcggggcctggtgtgggacgacgaggactcggccgacgatagcagcgtgttggacttgggcgggagcggtggggccaacccgttcgcgcatctgcagcccagactggggcgacggatgttttgaatgcaaaataaaactcaccaaggccatagcgtgcgttctcttccttgttagagatgaggcgcgcggtggtgtcttcctctcctcctccctcgtacgagagcgtgatggcgcaggcgaccctggaggttccgtttgtgcctccgcggtatatggctcctacggagggcagaaacagcattcgttactcggagctggctccgctgtacgacaccactcgcgtgtatttggtggacaacaagtcggcggacatcgcttccctgaactaccaaaacgaccacagcaacttcctgaccacggtggtgcagaacaacgatttcacccctgccgaggccagcacgcagacgataaattttgacgagcggtcgcggtggggcggtgatctgaagaccattctgcacaccaacatgcctaatgtgaacgagtacatgttcaccagcaagtttaaggcgcgggtgatggtggctagaaaaaaggcggaaggggctgatgcaaatgataggagcaaggatatcttagagtatcagtggtttgagtttaccctgcccgagggcaacttttccgagaccatgaccatagacctaatgaacaacgccatcttggaaaactacttgcaagtggggcggcaaaatggcgtgctggagagtgatatcggagtcaagtttgacagcagaaatttcaagctgggctgggacccggtgaccaagctggtgatgccaggggtctacacctacgaggccttccacccggacgtggtgctgctgccgggctgcggggtggatttcaccgagagccgcctgagcaacctcctgggcattcgcaagaagcaaccttttcaagagggcttcagaatcatgtatgaggacctagtagggggcaacatccccgctctcctgaatgtcaaggagtatctgaaggataaggaagaagctggcaaagcagatgcaaatactattaaggctcagaatgatgccgtcccaagaggagataactatgcatcagcggcagaagccaaagcagcaggaaaagaaattgagttgaaggccattttgaaagatgattcagacagaagctacaatgtgatcgagggaaccacagacaccctgtaccgcagttggtacctgtcctatacctacggggatcccgagaagggggtgcagtcgtggacgctgctcaccaccccggacgtcacctgcggcgcggagcaagtctactggtcgctgccggacctcatgcaagaccccgtcaccttccgctctacccagcaagtcagcaactaccccgtggtcggcgccgagctcatgcccttccgcgccaagagcttttacaacgacctcgccgtctactcccagctcatccgcagctacacctccctcacccacgtcttcaaccgcttccccgacaaccagatcctttgccgcccgcccgcgcccaccatcaccaccgtcagtgaaaacgtgcctgctctcacagatcacgggacgctaccgctgcgcagcagtatccgcggagtccagcgagtgaccgtcactgacgcccgtcgccgcacctgtccctacgtctacaaggccctgggcatagtcgcgccgcgcgtgctttccagtcgcaccttctaaaaaatgtctattctcatctcgcccagcaataacaccggctggggtcttactaggcccagcaccatgtacggaggagccaagaaacgctcccagcagcaccccgtccgcgtccgcggtcacttccgcgctccctggggcgcttacaagcgggggcggacctctgctcctgccgccgtgcgcaccaccgtcgacgacgtcatcgactcggtggtcgccgatgcgcgcaactacacccccgccccctcgaccgtggacgcggtcatcgacagcgtggtggcagacgcgcgtgactatgccagacgcaagagccggcggcgacggatcgccaggcgccaccggagcacgcccgccatgcgcgccgcccgagctctgctgcgccgcgccagacgcacgggccgccgggccatgatgcgagccgcgcgccgcgctgccactgcacccacccccgcaggcaggactcgcagacgagcggccgctgccgccgccgcggccatctctagcatgaccagacccaggcgcggaaacgtgtactgggtgcgcgactccgtcacgggcgtgcgcgtgcccgtgcgcacccgtcctcctcgtccctgatctaatgcttgtgtcctcccccgcaagcgacgatgtcaaagcgcaaaatcaaggaggagatgctccaggtcgtcgccccggagatttacggaccaccccaggcggaccagaaaccccgcaaaatcaagcgggttaaaaaaaaggatgaggtggacgagggggcagtagagtttgtgcgcgagttcgctccgcggcggcgcgtaaattggaaggggcgcagggtgcagcgtgtgttgcggcccggcacggcggtggtgttcacgcccggcgagcggtcctcggtcaggagcaagcgtagctatgacgaggtgtacggcgacgacgacatcctggaccaggcggcggagcgggcgggcgagttcgcctacgggaagcggtcgcgcgaagaggagctgatctcgctgccgctggacgaaagcaaccccacgccgagcctaaagcccgtgaccctgcagcaggtgctgccccaggcagtgctgctgccgagccgcggggtcaagcgcgagggcgagagcatgtacccgaccatgcagatcatggtgcccaagcgccggcgcgtggaggacgtgctggacaccgtaaaaatggatgtggagcccgaggtcaaggtgcgccccatcaagcaggtggcgccgggcctgggcgtgcaaaccgtggacattcagatccccaccgacatggatgtcgacaaaaaaccctcgaccagcatcgaggtgcaaaccgacccctggctcccagcctccaccgctaccgcgtccacttctaccgccgccacggctaccgagcctcccaggaggcgaagatggggcgccgccagccggctgatgcccaactacgtgttgcatccttccatcatcccgacgccaggctaccgcggcacccggtactacgccagccgcaggcgcccagccagcaaacgccgccgccgcaccgccacccgccgccgtctggcccccgcccgcgtgcgccgcgtgaccacgcggcggggccgctcgctcgttctgcccaccgtgcgctaccaccccagcatcctttaatccgtgtgctgtgatactgttgcagagagatggctctcacttgccgcctgcgcatccccgtcccgaattaccgaggaagatcccgccgcaggagaggcatggcaggcagtggcctgaaccgccgccggcggcgggccatgcgcaggcgcctgagtggcggctttctgcccgcgctcatccccataatcgccgcggccatcggcacgatcccgggcatagcttccgttgcgctgcaggcgtcgcagcgccgttgatgtgcgaataaagcctctttagactctgacacacctggtcctgtatatttttagaatggaagacatcaattttgcgtccctggctccgcggcacggcacgcggccgttcatgggcacctggaacgagatcggcaccagccagctgaacgggggcgccttcaattggagcagtgtctggagcgggcttaaaaatttcggctcgacgctccggacctatgggaacaaggcctggaatagtagcactgggcagttgttaagggaaaagctcaaagaccagaacttccagcaaaaggtggtggacgggctggcctcgggcattaacggggtggtggacatcgcgaaccaggccgtgcagcgcgagataaacagccgcctggacccgcggccgcccacggtggtggagatggaagatgcaactcttccgccgcccaagggcgagaagcgaccgcggcccgacgcggaggagacaatcctgcaagtggacgagccgccctcgtacgaggaggccgtcaaggccggcatgcccaccacgcgcatcatcgcgccgctggccacgggtgtaatgaaacccgctacccttgacctgcctccaccacccacgcccgctccaccaaaagcagctccggttgtgcagccccctccggtggcgaccgccgtgcgccgcgtccccgcccgccgccaggcccagaactggcagagcacgctgcacagtatcgtgggcctgggagtgaaaagtctgaagcgccgccgatgctattgagagagagtaaagaggacactaaagggagagcttaacttgtatgtgccttaccgccagagaacgcgcgaagatggccaccccctcgatgatgccgcagtgggcgtacatgcacatcgccgggcaggacgcctcggagtacctgagcccgggtctggtgcagtttgcccgcgccaccgacacgtacttcagcctgggcaacaagtttaggaaccccacggtggctcccacccacgatgtgaccacggaccggtcccagcgtctgacgctgcgctttgtgcccgtggatcgcgaggacaccacgtactcgtacaaggcgcgcttcactctggccgtgggcgacaaccgggtgctagacatggccagcacttactttgacatccgcggcgtcctggaccgcggcccaagcttcaaaccctactcgggcacggcttacaacagcctggcccccaagggcgcccccaatcccagtcagtggactaccaaagaaaagcaaaacggaggaactggagcagaaaaagatgttacaaagacatttggacttgccgccatgggaggcagtaatatttctaaagacggtttgcagattggaactgacaaaacagcaaatgctgaaaaaccaatctatgcagacaaaactttccagccagaacctcaagttggagaagaaaactggcaggataatgatgaatattatggcggcagggctcttaaaaaagataccaaaatgaagccatgctatggttcatttgctaaacccacaaacaaggaaggtgggcaggctaaattgaaagaaacacccaatggtaccgatcctcaatacgatgtggacatggctttctttgactcaagcactataaatataccagatgtggtgttgtacactgaaaatgtagatttggaaactccagatacacatgtggtgtacaaaccaggcaaagaggatgacagttctgaagctaatttaactcagcagtccatgcctaacagaccaaactacattggcttcagagacaactttgtggggctattgtactacaacagcactggcaacatgggtgtgctggctggtcaggcttctcagttgaatgccgtggtcgacttgcaagacagaaacaccgaactgtcttaccagctcttgctagattctcttggtgacagaaccagatattttagtatgtggaactctgcggtggacagctatgatcccgatgtcaggatcattgagaaccacggtgtggaagatgaacttcctaactattgcttccccttggacggtgttcaaactaattcagcctatcaaggtgttaaactaaagcctgatcaaacaggaggcggagttaatggagattgggtaaaggatgatgacatttcagcccataatcaaattggaaagggcaacatctttgccatggagatcaacctccaggccaacctgtggaagagttttctgtactcgaacgtggccctgtacctgcccgactcctacaagtacacgccggccaacgtcacgctgcccgccaacaccaacacctatgagtacatgaacggccgcgtggtagccccctcgctggtggacgcctacattaacatcggcgcccgctggtcgctggaccccatggacaacgtcaacccctttaaccaccaccgcaatgcgggcctgcgctaccgctccatgcttttgggcaatggccgctacgtgcccttccacatccaagtgccccaaaagttctttgccatcaagaacctgctcctgctccccggctcctacacctacgagtggaacttccgcaaggatgtcaacatgatcctgcagagttccctcggaaacgacctgcgcgtcgacggcgcctccgtccgcttcgacagcgtcaacctctacgccaccttcttccccatggcgcacaacaccgcctccaccctggaagccatgctgcgcaacgacaccaacgaccagtccttcaacgactacctctcggccgccaacatgctctaccccatcccggccaaggccaccaacgtgcccatttccatcccctcgcgcaactgggccgccttccgcggctggagtttcacccggctcaagaccaaggaaactccctcccttggctcgggttttgacccctactttgtctactcgggctccatcccctacctcgacgggaccttctacctcaaccacaccttcaagaaggtttccatcatgttcgactcctcggtcagctggcccggcaacgaccggctgcttacgccgaacgagttcgagatcaagcgcagcgtcgacggggagggctacaacgtggcccaatgcaacatgaccaaggactggttcctcgtccagatgctctcccactacaacatcggctaccagggcttccatgtgcccgagggctacaaggaccgcatgtactccttcttccgcaacttccagcccatgagcaggcaggtggtcgatgagatcaactacaaggactacaaggcagtcaccctgcccttccagcacaacaactctggcttcaccggctacctggcacccaccatgcgtcaggggcagccctaccccgccaacttcccctacccgctcatcggctccaccgcagtgccatccgtcacccagaaaaagttcctctgcgacagggtcatgtggcgcatccccttctccagcaacttcatgtccatgggcgccctcaccgacctgggtcagaacatgctctacgccaactcggcccacgcgctcgacatgaccttcgaggtggaccccatggatgagcccaccctcctctatcttctcttcgaagttttcgacgtggtcagagtgcaccagccgcaccgcggcgtcatcgaggccgtctacctgcgcacgcccttctccgccggcaacgccaccacctaagcatgagcggctccagcgaacgagagctcgcggccatcgtgcgcgacctgggctgcgggccctactttttgggcacccacgacaagcgcttcccgggcttcctcgccggcgacaagctggcctgcgccatcgtcaacacggccggccgcgagaccgggggcgtgcactggctcgcctttggctggaacccgcgctcgcgcacctgctacatgttcgaccccttcgggttctcggaccgccggctcaagcagatttacagcttcgagtacgaggccatgctgcgccgaagcgccctggcctcctcgcccgatcgctgtcttagcctcgaacagtccacccagaccgtgcaggggcccgactccgccgcctgcggactcttctgttgcatgttcttgcatgccttcgtgcactggcccgaccgacccatggacgggaaccccaccatgaacttgctgacgggggtgcccaacggcatgctacaatcgccacaggtgctgcccaccctcaggcgcaaccaggaggagctctaccgcttcctcgcgcgccactccccctactttcgctcccaccgcgccgccatcgaacacgccaccgcttttgataaaatgaaacaactgcgtgtatgactcaaataaacagcacttttattttacacatgcgctggagtatatgcaagttatttaaaagtcgaaggggttctcgcgctcgtcgttgtgcgccgcgctggggagggccacgttgcggtactggaacttgggctgccacttgaactcggggatcaccagtttgggcactggagtctcggggaaggtctcgctccacatgcgccggctcatttgcagggcgcccagcatgtcagggccggagatcttgaaatcgcagttgggaccggtgctctgcgcgcgcgagttgcggtacacggggttgcagcactggaacaccatcagactggggtacttcacactggcaagcacgctcttgtcgctaatctgatccttgtccaggtcctcggcgttgctcaggccgaacggggtcatcttgcacagctggcggcccaggaagggcacgctctgaggcttgtggttacactcgcagtgcacgggcatcagcatcatccccgcgccgcgctgcatattcgggtagagggccttgacgaaggccgcgatctgcttgaaagcttgctgggccttggccccctcgctaaaaaacaggccgcagctcttcccgctgaactggttattcccgcacccggcatcatgcacgcagcagcgcgcgtcatggctggtcagttgcaccacgctccgtccccagcggttctgggtcaccttagccttgctgggctgctccttcagcgcgcgctgtccgttctcgctggtcacatccatctccaccacgtggtccttgtgaatcatcaccgttccatgcagacacttgagctgaccttccacctcggtgcagccgtgatcccacaggacgcagccggtgcactcccaattcttgtgcgcgatcccgctgtggctgaaaatgtaaccttgcaacaggcgacccataatggtgctaaatgctttctgggtggtgaatgtcagttgcatcccgcgggcctcctcgttcatccaggtctggcacatcttctggaagatctcggtctgctccggcatgagcttgtaagcatcgcgcaagccgctgtcgacgcggtagcgttccatcagcacgttcatggtatccatgcccttctcccatgacgagaccagaggcagactcagggggttgcgcacgttcaggacaccaggggtcgcgggctcgacgatgcgttttccgtccttgccttccttcaacagaaccggaggctggctgaatcccactcccacgatcacggcgtcttcctggggcatctcttcgtcggggtctaccttggtcacatgcttggtctttctggcttgcttcttttttggagggctgtccacggggaccacgtcctcctcggaagacccggagcccacccgctgatactttcggcgcttggtgggcagaggaggtggcggcggcgaggggctcctctcctgctccggcggatagcgcgccgacccgtggccccggggcggagtggcctctcgctccatgaaccggcgcacgtcctgactgccgccggccattgtttcctaggggaagatggaggagcagccgcgtaagcaggagcaggaggaggacttaaccacccacgagcaacccaaaatcgagcaggacctgggcttcgaagagccggctcgtctaaaacccccacaggatgaacaggagcacgagcaagacgcaggccaggaggagaccgacgctgggctcgagcatggctacctgggaggagaggaggatgtgctgctaaaacacctgcagcgccagtccctcatcctccgggacgccctggccgaccggagcgaaacccccctcagcgtcgaggagctgtgtcgggcctacgagctcaacctcttctcgccgcgcgtgccccccaaacgccagcccaacggcacctgcgagcccaacccgcgtctcaacttctatcccgtctttgcggtccccgaggcccttgccacctatcacatctttttcaagaaccaaaagatccccatctcctgtcgcgccaatcgcactcgcgccgacgcgctcctcgctctggggcccggcgcgcgcatacctgatatcgcttccctggaagaggtgcccaagatcttcgaagggctcggtcgggacgagacgcgcgcggcaaacgctctgaaagaaacagcagaggaagagggttacactagcgccctggtagagttggaaggcgacaacgccaggctggccgtgcttaagcgcagcgtcgagctcacccatttcgcctaccccgccgtcaacctcccgcccaaggtcatgcgtcgcatcatggatcagctcatcatgccccacatcgaggcccttgatgaaagtcaggaacagcgccccgagaacgcccagcccgtggtcagcgacgagatgctcgcgcgctggctcgggacccgcgacccccaggccctggagcagcggcgcaagctcatgctggccgtggtcctggtcacccttgagctcgaatgcatgcgccgcttttttaccgaccccgagaccctgcgcaaggtcgaggagaccctgcactacactttcagacacggtttcgtcaggcaggcctgcaagatctccaacgtggagctgaccaacctggtctcctgcctggggatcctacacgagaaccgcttgggacagaccgtgctccactctaccctgaagggcgaggcgcggcgggactacatccgcgactgcgtctttctctttctctgccacacatggcaagcggccatgggcgtgtggcagcagtgtctcgaggacgagaacctgaaggagctggacaagcttcttgctagaaaccttaaaaagctgtggacgggcttcgacgagcgcaccgtcgcctcggacctggccgagatcgtcttccccgagcgcctgaggcagacgctgaaaggagggctgcccgacttcatgagccagagcatgttgcaaaactaccgcactttcattctcgagcgatctgggatgctgcccgccacctgcaacgccttcccctccgactttgtcccgctgagctaccgcgagtgtcccccgccgctgtggagccactgctacctcttgcagctggccaactacattgcccaccactcggatgtgatcgaggacgtgagcggcgaggggctgctcgagtgccactgtcgctgcaacctatgctccccgcaccgctccctggtctgcaacccccagctactgagcgagacccaggtcatcggtacctttgagctgcaaggtccgcaggagtccaccgctccgctgaaactcacgccggggttgtggacttccgcgtacctgcgcaaatttgtacccgaggactactacgcccatgagataaagttcttcgaggaccaatcgcgtccgcagcacgcggatctcacggcctgcgtcatcacccagggcgcgatcctcgcccaattgcacgccatccaaaaatcccgccaagagtttcttctgaaaaagggtagaggggtctacctggacccccagacgggcgaggtgctcaacccgggtctcccccagcatgccgaggaagaagcaggagccgctagtggaggagatggaagaagaatgggacagccaggcagaggaggacgaatgggaggaggagacagaggaggaagacttggaagaggtggaagaggagcaggcaacagagcagcccgtcgccgcaccatccgcgccggcagcccctccggtcacggatacaacctccgcagctccggccaagcctcctcgtagatgggatcgagtgaagggtgacggtaagcacgagcgacagggctaccgatcatggagggcccacaaagccgcgatcatcgcctgcttgcaagactgcggggggaacatcgctttcgcccgccgctacctgctcttccaccgcggggtgaacatcccccgcaacgtgttgcattactaccgtcaccttcacagctaagaaaaagcaagtcaaaggagtcgccggaggaggaggcctgaggatcgcggcgaacgagcccttgaccaccagggagctgaggaaccggatcttccccactctttatgccatttttcagcaaagtcgaggtcagcagcaagagctcaaagtaaaaaaccggtctctgcgctcgctcacccgcagttgcttgtaccacaaaaacgaagatcagctgcagcgcactctcgaagacgccgaggctctgttccacaagtactgcgcgctgactcttaaagactaaggcgcgcccacccggaaaaaaggcgggaattacctcatcgccaccatgagcaaggagattcccaccccttacatgtggagctatcagccccagatgggcctggccgcgggcgcctcccaggactactccacccgcatgaactggcttagtgccggcccctcgatgatctcacgggtcaacggggtccgtaaccatcgaaaccagatattgttgcagcaggcggcggtcacctccacgcccagggcaaagctcaacccgcgtaattggccctccaccctggtgtatcaggaaatccccgggccgactaccgtactacttccgcgtgacgcactggccgaagtccgcatgactaactcaggtgtccagctggccggcggcgcttcccggtgcccgctccgcccacaatcgggtataaaaaccctggtgatccgaggcagaggcacacagctcaacgacgagttggtgagctcttcaatcggtctgcgaccggacggagtgttccaactagccggagccgggagatcgtccttcactcccaaccaggcctacctgaccttgcagagcagctcttcggagcctcgctcgggaggcatcggaaccctccagttcgtggaggagtttgtgccctcggtctacttcaaccccttctcgggctcgccaggcctctacccggacgagtttataccgaacttcgacgcagtgagagaagcggtggacggctacgactgaatgtcctatggtgactcggctgagctcgctcggttgaggcatctggaccactgccgccgcctgcgctgctttgcccgggagagctacggcctcatctactttgagctgcccgaggagcaccccaacggccctgcacacggagtgcggatcaccgtagagggcaccaccgagtctcacctggtcaggttcttcacccagcaacccttcctggtcgagcgggaccggggcgccaccacctacaccgtctactgcatttgtcctaccccgaagttgcatgagaatttttgttgtactctttgtggtgagtttaataaaagctaaactcttgcaatactctggaccttgtcgtcatcaactcaacgagaccgtctacctcaccaaccagactgaggtaaaacttacctgcagaccacacaagacctatatcatctggttcttcgagaacacctcatttgcagtctccaacactcactgcaacgacggtgttgaacttcccaacaacctttccagtggactgagttacaatacacgtagagctaagctcatcctctacaatccttttgtagagggaacctaccagtgccagagcggaccttgcttccacagttttactttggtgaacgttaccggcagcagcacagccgctccagaaactaaccttccttctgatactatcaaaccttgtttcggaggtgagctaaggcttcccccttctcaggagggggttagcccatacgaagtggtcgggtatttgattttaggggtggtcctgggtgggtgcatagcggtgctagctcagctgccttgctgggtggaaatcaaaatctttatatgctgggtaagacattgtggggaggaactatgaaggggctcttgctgattatcctttccctggtggggggtgtgctgtcatgccacgaacagccacgatgtaacatcaccacaggcaatgagaggaacgactgctctgtagttatcaaatgcgagcaccattgtcctctcaacattacattcaaaaataagaccatgggaaatgtatgggtgggattctggcaaccaggagatgagcagaactacacggtcactgtccatggtagcaatggcaatcacactttcggtttcaaattcatttttgaagtcatgtgtgatatcacactacatgtggctagacttcatggcttgtggccccctaccaaggataacatggtgggtttttctttggcttttgtgatcatggcctgcttgatgtcaggtctgctggtaggggctctagtgtggtttctgaaacgcaagcccaggtatggaaatgaagagaaggaaaaattgctataaattctttttctttttcgcagaaccatgaatacagtgatccgtatcgtgctgctctctcttcttgtagcttttagtcaggcaggatttcatactatcaatgctacatggtgggctaatataactttagtgggacccccagacacaccagtcacttggtatgatactcaaggattgtggttttgcaatggcagtagagttaagaatcctcaaatcagacatacatgtaatgatcaaaaccttactttgatccatgtgaacaaaacttatgaaagaacatacatgggttataatagacaagggactaaaaaagaagactacaaagttgtagttataccacctcctcctgctactgtaaaaccacagccagagccagagtatgtgtttgtttatatgggagagaacaaaactctagaaggtcctccgggaactccagtcacatggtttaatcaggatggaaagaaattttgtgaaggagaaaaagttcttcatccagaatttaaccacacctgtgacaaacaaaaccttatactactgtttgtgaattttacacatgatggagcttaccttgggtacaatcatcaaggaacccagagaacacactatgaagttacagtattagatctttttccagattctggccaaatgaaaattgaaaatcatagtgaggaaacagagcaaaaaaatgatgaacatcataactggcagaaacagggtgggcaaaaacagggtgggcaaaaaacaaatcaaacaaaagttaatgacaggagaaaaacagcgcaaaaaagaccatcaaagctaaagccggcaactattgaggcaatgctggttacagtgactgccgggtctaacttaactttggttggacctaaagcagaaggaaaagttacttggtttgatggagatttaaaaagaccatgtgagcctaattacagactaagacacgaatgtaataatcaaaacttaactctgattaatgtaactaaagattatgagggaacttactatggtacaaatgacaaagatgagggcaaaaggtacagagtgaaagtaaatactacaaattctcaatctgtgaaaattcagccatataccagacaaactactcctgatcaagagcacaaatttgaattacagttcgaaactaatggaaattatgattcaaaaattccctcaaccactgtggcaatcgtggtgggtgtgattgcgggcttcataactctgatcattgtcttcatatgctacatctgctgccgcaagcgtcccagggcatacaatcatatggtagacccactactcagcttctcttactaagactcagtcactttcatttcagaaccatgaaggctttcacagcttgcgttctgattagcctagtcacacttagtgtagctattaaaaatcaatatcatgttcataatgttaccagagatggatatatcacattaaatgtaacaattgataatactacctggacaagatatcatttaaataagtggcatcaaatttgtacgtggtcagacccatcatacaaatgtcacagcaatggcagcattaccattcatgctttcaatattacttctggccagtacaaagctgaaagttttactaactggtttagatattacggtaatcataaacatgaaattcatatttttaacataactgtaattgagcatcctacaacaaaagcacccaccactgctaatacagctacatcaattaaatcaacaaccacacagcctactactagggagacaactcaacctaccaccacagtcagtacaactactgagaccactactcaaactacacagctagacacaacagtgcagaatagcactgtgttggttaggtatctgttgagggaggaaagtactactgaacagacagaggctacctcaagtgcctttagcagcactgcaaatttaacttcgcttgcttggactaatgaaaccggagtatcattgatgaatcatcagcctttctcaggtttggatattcaaattacttttctggttgtttgtgggatctttattcttgtggttcttctgtactttgtctgctgcaaagccagagagaaatctaggaggcccatctacaggccagtaatcggggaacctcagccactccaagtggaagggggtctaaggaatcttcttttctctttttcagtatggtgatcagccatgattcctaggttcttcctatttaacatcctcttctgtctcttcaacatctgcgctgcctttgcagccgtctcgcacgcctcgcccgactgtctcgggcccttcccaacctacctcctctttgccctgctcacctgcacctgcgtctgcagcattgtctgcctggtcatcaccttcctgcagcttatcgactggtgctgtgcgcgctacaattatctccatcacagtcccgaatacagggacaagaacgtagccagaatcttaaggctcatctgaccatgcagactctgctcatgctgctatccctcctatcccctgccctagccacttatgctgattactctaaatgcaaattcgcagacatatggaatttcttagattgctatcaggaaaaaattgatatgccctcctattacttggtgattgtgggaatagtcatggtctgctcctgcactttctttgccatcatgatttacccctgttttgatctcggctggaactctgttgaagcattcacatacacactagaaagcagttcactagcctccacgccaccacccacaccgcctcctcgcagaaatcagttccccctgatacagtacttagaagagccccctccccgacccccttccactgttagctactttcacataaccggcggcgatgactgaccaccacctggacctcgagatggacggccaggcctccgagcagcgcatcctgcaactgcgcgtccgtcagcagcaggagcgggccgccaaggagctccttgatgccatcaacatccaccagtgcaagaagggcatcttctgcctggtcaaacaggcaaagatcacctacgagctcgtgtccaacggcaaacagcatcgccttacctatgagatgccccagcagaagcagaagttcacctgcatggtgggcgtcaaccccatagtcatcacccagcagtcgggcgagaccaacggctgcatccactgctcctgcgaaagccccgagtgcatctactcccttctcaagaccctttgcggactccgcgacctcctccccatgaactgatgttgattaaaagcccagaaaccaatcagacccttcctcatttccccatcccaatactcataagaataaatcattggaattaatcattcaataaagatcacttacttgaaatctgaaagtatgtctctggtgtagttgctcagcaacacctcggtaccctcctcccagctctggtactccagtccccggcgggcggcgaacttcctccacaccttgaaagggatgtcaaattcctggtccacaattttcattgtcttccctcttagatgtcaaagaggctccgggtggaagatgacttcaaccccgtctacccctatggctacgcgcggaatcagaatatccccttcctcactcccccctttgtctcctccgatggattcaaaaacttcccccctggggtactgtcactcaaactggctgatccaatcaccattaccaatggggatgtatccctcaaggtgggaggtggtctcactttgcaagatggaagcctaactgtaaaccctaaggctccactgcaagttaatactgataaaaaacttgagcttgcatatgataatccatttgaaagtagtgctaataaacttagtttaaaagtaggacatggattaaaagtattagatgaaaaaagtgctgcggggttaaaagatttaattggcaaacttgtggttttaacaggaaaaggaataggcactgaaaatttagaaaatacagatggtagcagcagaggaattggtataaatgtaagagcaagagaagggttgacatttgacaatgatggatacttggtagcatggaacccaaagtatgacacgcgcacactttggacaacaccagacacatctccaaactgcacaattgctcaagataaggactctaaactcactttggtacttacaaagtgtggaagtcaaatattagctaatgtgtctttgattgtggtcgcaggaaagtaccacatcataaataataagacaaatccaaaaataaaaagttttactattaaactgctatttaataagaacggagtgcttttagacaactcaaatcttggaaaagcttattggaactttagaagtggaaattccaatgtttcgacagcttatgaaaaagcaattggttttatgcctaatttggtagcgtatccaaaacccagtaattctaaaaaatatgcaagagacatagtttatggaactatatatcttggtggaaaacctgatcagccagcagtcattaaaactacctttaaccaagaaactggatgtgaatactctatcacatttaactttagttggtccaaaacctatgaaaatgttgaatttgaaaccacctcttttaccttctcctatattgcccaagaatgaaagaccaataaacgtgtttttcatttgaaattttcatgtatctttattgatttttacaccagcacgagtagacagtctcccaccaccagcccattttacagtgtacacggttctctcagcacgggtagccttaaatagggaaatattctcattagtgcgggaattggacttggggtctataatccacacagtttcctggcgagccaaacgggggtcggtgattgaaataaagccgtcctctgaaaagtcatccaagcgggcctcacagtccaaggtcacagtctggtggaacgagaagaacgcacagattcatactcggaaaacaggatgggtctgtgcctctccatcagcgccctcagcagtctctgccgccggggctcggtgcggctgctgcaaatgggatcgggatcacaagtctctctgactatgatcccaacagccttcagcatcagtctcctggtgcgacgggcacagcaccgcatcctgatctctgccatgttctcacagtaagtgcagcacataatcaccatgttattcagcagcccataattcagggcgctccagccaaagctcatgttgggaatgatggaacccacgtgaccatcgtaccagatgcgacagtatatcaggtgcctgcccctcatgaacacactgcccatgtacatgatctctttgggcatgtttctgtttacaatctggcggtaccaggggaagcgctggttgaacatgcacccgtaaatgactctcctgaaccacacggccagcagggtgcctcccgcccgacactgcagggagccaggggatgaacagtggcaatgcaggatccagcgctcgtacccgctcaccatttgagctcttaccaagtccagggtagcggggcacaggcacactgacatacatctttttaaaatttttatttcctctgtggtgaggatcatatcccaggggactggaaactcttggagcagggtaaagccagcagcacatggtaatccacggacagaacttacattatgataatctgcatgatcacaatcgggcaacaggggatgttgttcagtcagtgaagccctggtttcctcatcagatcgtggtaaacgggccctgcgatatggatgatggcggagcgagctggattgaatctcggtttgcattgtagtggattctcttgcgtaccttgtcgtacttctgccagcagaaatgggcccttgaacagcatatacccctcctacggccgtcctttcgctgctgccgctcagtcatccaactaaagtacatccattctcgaagattctggagaagttcctctgcatctgataaaataaaaaacccgtccatgcgaattcccctcatcacatcagccaggactctgtaggccatccccatccagttaatgctgccttgtctatcattcagagggggcggtggcaggactggaagaaccatttttattccaaacggtctcgaaggacgataaagtgcaagtcacgcaggtgacagcgttcccctccgctgtgctggtggaaacagacagccaggtcaaaacccactctattttcaaggtgctcgaccgtggcttcgagcagtggctctacgcgcacatccagcataagaatcacattaaaggctggccctccatcgatttcatcaatcatcaggttacattcctgcaccatccccaggtaattctcatttttccagccttggattatctctacaaattgttggtgtaagtccactccgcacatgtggaaaagctcccacagtgccccctccactttcataatcaggcagaccttcataatagaaacagatcctgctgctccaccacctgcagcgtgttcaaaacaacaagattcaataaggttctgccctccgccctgagctcgcgcctcaatgtcagctgcaaaaagtcacttaagtcctgggccactacagctgacaattcagagccagggctaagcgtgggactggcaagcgtaagggaaaactttaatgctccaaagctagcacccaaaaactgcatgctggaataagctctctttgtgtctccggtgatgccttccaaaatgtgagtgataaagcgtggtagtttttctttaatcatttgcgtaatagaaaagtcctctaaataagtcactaggaccccagggaccacaatgtggtagcttacaccgcgtcgctgaagcatggttagtagagatgagagtctgaaaaacagaaagcatgcactaaactaaggtggctattttcactgaaggaaaaatcactctctccagcagcagggtacccactgggtggcccttgcggacatacaaaaatcggtccgtgtgattaaaaagcagcacagtaagttcctgtcttcttccggcaaaaatcacatcagactgggttagtatgtccctggcatggtagtcattcaaggccataaatctgccctgatatccagtaggaaccagcacactcacttttaggtgaagcaataccaccccatgcggaggaatgtggaaagattcagggcaaaaaaattatatctattgctagccccttcctggacgggagcaatccctccaggactatctataaaagcatacagagattcagccatagcttagcccgcttaccagtagacagaaagcacagcagtacaagcgccaacagcagcaactgactacccactgacccagctccctatttaaaggcaccttacactgacgtaatgaccaaaggtctaaaaaccccgccaaaaaaaacacacacgccctgggtgtttttcacaaaaacacttccgcgttctcacttcctcgtatcgattttgtgactcaacttccgggttcccacgttacgtcacttctgcccttacatgtaacttggccgtatggcgccatcttgcccacgtccaaaatggctttcatgaccggccacgcctccgcgccggccgttagccgtgcgtcgtgacgttatttgcatcaccgcttctcgtccaatcagcgttggctccgccccaaaaccgttaaaattcaaaagctcatttgcatattaacttttgtttactttgtggggtatattatgatgatg

SEQ ID NO: 207 - DNA, 35385 bp, Unknown
  Description of Unknown: Human adenovirus 50 sequence
caatcaatataatataccttatagatggaatggtgccaatatgtaaatgaggtaatttaaaaaagtgcgcgctgtgtggtgattggctgcggggtgaacggctaaaaggggcggacatgctgggaggtgacgtgacttatgggggaggagttatgttgcaagttatcgcggtaaaggtgacgtaaaacgaggtgtggtttggacacggaagtagacagttttcccacgcttactgacaggatatgaggtagttttgggcggatgcaagtgaaaattctccattttcgcgcgaaaactgaatgaggaagtgaatttctgagtcatttcgcggttatgacagggtggagtatttgccgagggccgagtagactttgaccgtttacgtggaggtttcgattaccgtgtttttcacctaaatttccgcgtacggtgtcaaagtcctgtgtttttacgtaggtgtcagctgatcgctagggtatttaaacctgtcgagttccgtcaagaggccactcttgagtgccagcgagaagagttttctcctccgcgccgcgagtcagttttgcgctttgaaaatgagacacctgcgattcctgccacaggagattatctccagcgagaccgggatagaaatactggagtttgtggtaaataccctgatgggagatgacccggaaccgccagcgcagcctttcgatccacctacgctgcacgatctgtatgatttagaggtagacgggccggacgatcccaatgaggaagctgtaaatgggttttttactgattctatgctactagctgccgatgaaggattggacataaaccctcctcctgagacccttgataccccaggggtggttgtggaaagcggcagaggtgggataaaattgcctgatctgggagcagctgaaatggacttgcgttgttatgaagagggttttcctccgagtgatgatgaagatggggaaactgaacagtccatccataccgcagtgaatgagggagtaaaagctgccagcgatgtttttaagttggactgtccggagctgcctggacatggctgtaagtcttgtgaatttcacaggaataacactggaatgaaagaactattgtgctcgctttgctatatgagaatgcactgccattttatttacagtaagtgtatttaagtgaaatttaaaggaatagtgtagctgtttaataactgttgaatggtagatttatgtttttacttgtgattttttgtaggtcctgtgtctgatgatgagtcgccttctcctgattcaactacctcacctcctgaaattcaggcgcccgtacctgcaaacgtatgcaagcccattcctgtgaagcctaagtctgggaaacgccctgctgtggataagcttgaggacttgttggagggtggggatggacctttggaccttagtacccggaaactgccaaggcaatgagtgccctgcagctgtgtttatttaatgtgacgtcatgtaataaaattatgtcagctgctgagtgttttattgcttcttgggtggggacttggatatataagtaggagcagatctgtgtggttagcttatagcaacctgctgccatccatggaggtttgggctatcttggaagacctgagacagactaggctactgctagaaaacgcctcggacggagtctctggcttttggagattctggttcggtggtgatctagctaggctagtgtttaggataaaacaggactacagggaagaatttgaaaagttattggacgacagtccaggactttttgaagctcttaacttgggccatcaggctcattttaaggagaaggttttatcagttttagatttttctactcctggtagaactgctgctgctgtagcttttcttacttttatattggataaatggatccgacaaacccacttcagcaagggatacgttttggatttcatagcagcagctttgtggagaacatggaaggctcgcagcatgaggacaatcttagattactggccagtgcagcctctgggagtagcagggatactgagacacccaccgaccatgccagcggttctggaggaggagcagcaggaggacaatccgagagccggcctggaccctccggtggaggagtagctgacctgtttcctgaactgcgacgggtgcttactaggtctacgtccagtggacaggacaggggcattaagagggaaaggaatcctagtgggaataattcaagaaccgagttggctttaagtttaatgagccgtaggcgtcctgaaactgtttggtggcatgaggttcagagcgaaggcagggatgaagtttcaatattgcaggagaaatattcactagaacaacttaagacctgttggttggaacctgaggatgattgggaggtggccattaggaattatgctaagatatctctgaggcctgataaacagtatagaattactaaaaagattaatattagaaatgcatgctacatatcagggaatggggcagaggttataatagatacccaagataaagcagcttttagatgttgtatgatgggtatgtggccaggggttgtcggcatggaagcagtaacatttatgaatattaggtttaaaggggatgggtataatggcattgtatttatggctaacactaagctgattctacatggttgtagcttttttgggtttaataatacttgtgtagaagcttgggggcaagttggtgtgaggggttgtagtttttatgcatgctggattgcaacatcaggtagggtcaagagtcagttgtctgtgaagaaatgcatgtttgagagatgtaatcttggcatactgaatgaaggtgaagcaagggtccgccactgcgcagctacagaaactggctgcttcattctaataaagggaaatgccagtgtgaagcataatatgatctgtggacattcgaatgagaggccttatcagatgctgacttgcgctggtggacattgcaatattcttgctaccgtgcatatcgtttcccatgcacgcaagaaatggcctgtatttgaacataatgtgattaccaagtgcaccatgcacataggtggtcgcaggggaatgtttatgccttaccagtgtaacatgaatcatgtgaaggtgatgttggaaccagatgccttttccagagtgagcttaacaggaatctttgatatgaatattcaactatggaagatactgagatatgatgacactaaaccgagggtgcgcgcatgcgaatgcggaggcaagcatgctagattccagccggtgtgcgtggatgtgactgaagacctgagacccgatcatttggtgcttgcctgcactggagcggagttcggttctagtggtgaagaaactgactaaagtgagtagtggggcaagatgtggatggagactttcaggttggtaaggtggacagattgggtaaattttgttaatttctgtcttgcagctgccatgagtggaagcgcttcttttgaggggggagtatttagcccttatctgacgggcaggctcccatcatgggcaggagttcgtcagaatgtcatgggatccactgtggatgggagacccgtccagcccgccaattcctcaacgctgacctatgccactttgagttcgtcaccattggatgcagctgcagccgccgccgctactgctgccgccaacaccatccttggaatgggctattacggaagcatcgttgccaattccagttcctctaataacccttcaaccctggctgaggacaagctacttgttctcttggctcagctcgaggccttaacccaacgcttaggcgaactgtctaagcaggtggcccagttgcgtgagcaaactgagtctgctgttgccacagcaaagtctaaataaagatctcaaatcaataaataaagaaatacttgttataaaaacaaatgaatgtttatttggtttttcgcgcgcggtatgccctggaccatcggtctcgatcattgagaactcggtggatcttttccagtaccctgtaaaggtgggattgaatgtttagatacatgggcattagtccgtctcgggggtggagatagctccattgaagagcctcttgctccggggtagtgttataaatcacccagtcatagcaaggtcggagtgcatggtgttgcacaatatcttttaggagcagactaattgcaacggggaggcccttagtgtaggtgtttacaaatctgttgagctgggacgggtgcatcctgggggaaattatatgcattttggactggatcttgaggttggcaatgttgccgcctagatcccgtctcgggttcatattgtgcagaaccaccaagacagtgtatccggtgcacttgggaaatttatcatgcagcttagagggaaaagcatgaaaaaatttggagacgcctttgtgaccccccagattctccatgcactcatccataatgatagcgatggggccgtgggcagcggcacgggcgaacacgttccgggggtctgaaacatcatagttatgctcctgagtcaggtcatcataagccattttaataaactttgggcggagggtgccagattgggggatgaaagttccctctggcccgggagcatagtttccctcacatatttgcatttcccaggctttcagttccgagggggggatcatgtccacctgcggggctataaaaaataccgtttctggagccggggtgattaactgggatgagagcaaattcctaagcagctgagacttgccgcacccagtgggaccgtaaatgaccccaattacgggttgcagatggtagtttagggagcgacagctgccgtcctcccggagcaggggggccacttcgttcatcatttcccttacatggatattttcccgcaccaagtccgttaggaggcgctctcccccaagggatagaagctcctggagcgaggagaagtttttcaacggtttcagcccgtcagccatgggcattttggaaagagtctgttgcaagagctcgagccggtcccagagctcggtgatgtgctctatggcatctcgatccagcagacctcctcgtttcgcgggttgggacggctcctggagtagggaatcagacgatgagcgtccagcgctgctagggtccgatccttccatggtcgcagcgtccgagtcagggttgtttccgtcacggtgaaggggtgcgcgcctggttgggcgcttgcgagggtgcgcttcagactcatcctgctggtcgagaaccgctgccgatcggcgccctgcatgtcggccaggtagcagtttaccatgagttcgtagttgagcgcctcggccgcgtggcctttggcacggagcttacctttggaagttttatggcaggcggggcagtagatacatttgagggcatacagcttgggcgcgaggaaaatggattcgggggagtatgcatccgcaccgcaggaggcgcagacggtttcgcactccacgagccaggtcagatccggctcatcggggtcaaaaacaagttttccgccatgttttttgatgcgtttcttacctttggtttccatgagttcgtgtccccgctgggtgacaaagaggctgtccgtgtccccgtagaccgactttatgggcctgtcctcgagcggagtgcctcggtcctcttcgtagaggaacccagcccactctgatacaaaagcgcgtgtccaggccagcacaaaggaggccacgtgggaggggtagcggtcgttgtcaaccagggggtccaccttctctacggtatgtaaacacatgtccccctcctccacatccaagaatgtgattggcttgtaagtgtaggccacgtgaccaggggtccccgccgggggggtataaaagtgggcgggcctctgttcgtcctcactgtcttccggatcactgtccaggagcgccagctgttggggtaggtattctctctcgaaggcgggcatgacctctgcactcaggttgtcagtttctaggaacgaggaggatttgatattgacagtaccagcagagatgcctttcataagactctcgtccatctggtcagaaaacacaatcttcttgttatccagcttggtggcaaatgatccatagagggcattggatagaagcttggcgatggagcgcatggtttggttcttttccttgtccgcgcgctccttggcggcgatgttaagctggacgtactcgcgcgccacacatttccattcagggaagatggttgtcagttcatccggaactattctgactcgccatcccctattgtgcagggttatcagatccacactggtggctacctcgcctcggaggggctcattggtccagcagagtcgacctccttttcttgaacagaaaggggggagggggtctagcatgaactcatcaggggggtccgcatctatggtaaatattcccggtagcaaatctttgtcaaaatagctgatggtggcgggatcatccaaggtcatctgccattctcgaactgccagcgcgcgctcgtaggggttaagaggggtgccccagggcatggggtgggtgagcgcggaggcatacatgccacagatatcgtagacatagaggggctcttcgaggatgccgatgtaagtgggataacagcgcccccctctgatgcttgctcgcacatagtcatagagttcatgtgagggggcgagaagacccgggcccagattggtgcggttgggtttttccgccctgtaaacgatctggcgaaagatggcatgggaattggaagagatagtaggtctctggaatatgttaaaatgggcatgaggtaggcctacagagtcccttatgaagtgggcatatgactcttgcagcttggctaccagctcggcggtgacgagtacgtccagggcacagtagtcgagagtttcctggatgatgtcataacgcggttggcttttcttttcccacagctcgcggttgagaaggtattcttcgcgatccttccagtactcttcgaggggaaacccgtctttttctgcacggtaagagcccaacatgtagaactgattgactgccttgtagggacagcatcccttctccactgggagagagtatgcttgggctgcattgcgcagcgaggtatgagtgagggcaaaagtgtccctgaccatgactttgaggaattgatacttgaagtcgatgtcatcacaggccccctgttcccagagttggaagtccacccgcttcttgtaggcggggttgggcaaagcgaaagtaacatcattgaagaggatcttgccggccctgggcatgaaatttcgggtgattctgaaaggctgagggacctctgctcggttattgataacctgagcggccaagacgatctcatcaaagccattgatgttgtgccccactatgtacagttctaagaatcgaggggtgcccctgacatgaggcagcttcttgagttcttcaaaagtgaggtctgtagggtcagtgagagcatagtgttcgagggcccattcgtgcacgtgagggttcgctttgaggaaggaggaccagaggtccactgccagtgctgtttgtaactggtcccggtactgacgaaaatgctgcccgactgccatcttttctggggtgacgcaatagaaggtttgggggtcctgccgccagcgatcccacttgagttttatggccaggtcataggcgatgttgacgagccgctggtctccagagagtttcatgaccagcatgaaggggattagctgcttgccaaaggaccccatccaggtgtaggtttccacatcgtaggtgaggaagagcctttctgtgcgaggatgagagccaatcgggaagaactggatctcctgccaccagttggaggaatggctgttgatgtgatggaagtagaactccctgcgacgcgccgagcattcatgcttgtgcttgtacagacggccgcagtactcgcatcgattcacgggatgcacctcatgaatgagttgtacctgacttcctttgacgagaaatttcagtggaaaattgaggcctggcgattgtacctcgcgctctactatgttgtctgcatcggcatgaccatcttctgtctcgatggtggtcatgctgacgagccctcgcgggaggcaagtccagacctcggcgcggcaggggcggagctcgaggacgagagcgcgcaggccggagctgtccagggtcctgagacgctgcggagtcaggttagtaggcagtgtcaggagattgacttgcatgatcttttcgagggcgtgagggaggttcagatggtacttgatctccacgggtccgttggtggagatgtcgatggcttgcagggttccgtgccccttgggcgctaccaccgtgcccttgtttttccttttgggcggcggtggctctgttgcttcttgcatgtttagaagcggtgtcgagggcgcgcaccgggcggcaggggcggttcgggacccggcggcatggccggcagtggtacgtcggcgccgcgcgcgggtaggttctggtactgcgccctcagaagactcgcatgcgccacgacgcggcggttgacatcctggatctgacgcctctgggtgaaagctaccggccccgtgagcttgaacctgaaagagagttcaacagaatcaatctcggtatcgttgacggcggcttgcctaaggatttcttgcacgtcgccagagttgtcctggtaggcgatctcggccatgaactgctcgatctcttcctcttgaagatctccgcggcccgctctctcgacggtggccgcgaggtcgttggagatacgcccaatgagttgagagaatgcattcatgcccgcctcgttccagacgcggctgtagaccacagcccccacgggatctctcgcgcgcatgaccacctgggcgaggttgagctccacgtggcgggtgaagaccgcatagttgcataggcgctggaaaaggtagttgagtgtggtggcgatgtgctcggtgacgaagaaatacatgatccatcgtctcagcggcatctcgctgacatcgcccagcgcttccaagcgctccatggcctcgtagaagtccacggcaaagttgaaaaactgggagttacgcgcggacacggtcaactcttcttccaaaagacggatgagttcggcgatggtggtgcgcacctcgagctcgaaagcccctgggatttcttcctcaatctcttcttcttccactaacatctcttcctcttcaggtggggctgcaggaggagggggaacgcggcgacgccggcggcgcacgggcagacggtcgatgaatctttcaatgacctctccgcggcggcggcgcatggtctcggtgacggcacgaccgttctccctgggtctcagagtgaagacgcctccgcgcatctccctgaagtggtgactgggaggctctccgttgggcagggacaccgcgctgattatgcattttattaattgccccgtaggtactccgcgcaaggacctgatcgtctcaagatccacgggatctgaaaacctttcgacgaaagcgtctaaccagtcgcaatcgcaaggtaggctgagcactgtttcttgcgggcgggggcggctagacgctcggtcggggttctctctttcttctccttcctcctctttggagggtgagacgatgctgctggtgatgaaattaaaataggcagttttgagacggcggatggtggcgaggagcaccaggtctttgggtccggcttgttggatgcgcaggcgatgggccattccccaagcattatcctgacatctggccagatctttatagtagtcttgcatgagtcgttccacgggcacttcttcttcgcccgctctgccatgcatgcgagtgatcccgaacccgcgcatgggctggacaagtgccaggtccgctacaaccctttctgcgaggatggcttgctgcacctgggtgagggtggcttggaagtcgtcaaagtccacgaagcggtggtaagccccggtgttgattgtgtaggagcagttggccatgactgaccagttgactgtctggtgcccagggcgcacaagctcggtatacttaaggcgcgagtatgcgcgggtgtcaaagatgtaatcgttacaggtgcgcaccaggtactggtagccgatgagaaagtgcggcggcggctggcggtataggggccatcgctctgtagccggggcgccaggggcgaggtcttccagcatgaggcggtgataaccgtagatgtacctggacatccaggtgataccggaggcggtggtggatgcccgcgggaactcgcgtacgcggttccagatgttgcgcagcggcatgaagtagttcatggtaggcacggtttggcccgtgagacgtgcacagtcgttgatgctctagacatacgggcaaaaacgaaagcggtcagcggctcgtctccgtggcctggaggctaagcgaacgggttgggctgcgcgtgtaccccggttcgaatctcggatcaggctggagccgcagctaacgtggtactggcactcccgtctcgacccaggcctgcacaaaacctccaggatacggaggcgggtcgtttttttttttttggctttttcctggatgggagccaatgctgcgtcaagctttagaacactcagttctcggggctgggagtggctcgcgcccgtagtctggagaatcaatcgccagggttgcgttgcggtgtgccccggttcgagtcttagcgcgccggatcggccggtttccgcgacaagcgagggtttggcagcctcgtcatttctaagaccccgccagccgacttctccagtttacgggagcgagccctctttttttgtttttttgttgcccagatgcatcccgtgctgcgacagatgcgcccccagcaacagcccccttctcagcagcagctacaacaacagccacaaaaggctcttcctgctcctgtaactactgcggctgcagccgtcagcggcgcggggcagcccgcctatgatctggacttggaagagggcgagggactggcgcgcctgggcgcaccatcgcccgagcggcacccgcgggtgcaactgaaaaaggactctcgcgaggcgtacgtgccccagcagaacctgttcagggacaggagcggcgaggagcctgaggaaatgcgagcttcccgctttaacgcgggtcgcgaactgcgtcacggtctggaccgaagacgggtgctgcgtgatgatgattttgaagtcgatgaagtgacaggaataagtcctgctagggcacatgtggccgcggccaacctagtatcagcttacgagcagaccgtgaaggaggagcgcaactttcaaaaatctttcaacaaccatgtgcgcaccctgattgcccgcgaggaagtgacactgggtctgatgcacctgtgggacctgatggaagccattacccagaaccccaccagcaaacctctaaccgctcagctgtttctggtggtgcaacatagtagagacaatgaggcatttagggaggcgctgttgaacattactgagcccgaggggagatggttgtatgatcttatcaatattctgcaaagtataatcgtgcaagaacgtagcctgggtctagctgagaaggtggctgctattaactactcggtcttgagcctgggcaagcactacgctcgcaagatctacaaaaccccatacgtacctatagacaaggaggtgaagatagatgggttttatatgcgcatgactctcaaggtgctgaccttgagtgacgatctgggagtgtaccgcaacgacaggatgcaccgcgcagtgagcgccagcagaaggcgtgagctgagcgacagagaacttatgcacagcttgcaaagagctctgactggggctggaaccgagggggaaaactactttgacatgggagcggacttgcagtggcagcccagtcgcagggccctggacgcagcagggtatgagcttccttacatagaagaggtggatgaaggccaggatgaggagggcgagtatctggaagactgatggcgcgaccatccatatttttgctagatggaacagcaggcaccggaccccgcaaaacgggcggcgctacagagccagccgtccggcattaactcctcggacgattggagccaggccatgcaacgcatcatggcgctgacgacccgcaaccccgaagcctttagacagcaaccccaggccaaccgcctttctgccatcctggaggccgtagtgccctcccgctccaaccccacacacgagaaggtcctggccatcgtgaacgcgctggtggagaacaaagccatacgtcccgatgaggctgggctggtatacaatgccctattggagcgcgtagcccgttacaacagcagcaacgtgcagaccaacctggaccggatggtgaccgatgtgcgcgaggccgtgtctcagcgcgagcggttccagcgagacgccaatttagggtcgctggtggctttgaacgccttcctcagcactcagcctgccaacgtgcctcgcggtcagcaagactacacaaactttctaagtgcattgagactcatggtggccgaagtccctcaaagcgaagtgtaccagtccgggccagactactttttccagaccagcagacagggcttgcagacagtgaacctgagccaggcttttaagaacctgaatggtctgtggggagtgcgcgccccagtgggagatcgggcgaccgtgtctagcttgctgacccccaactcccgcctactactgctcttggtagccccattcactgacagcggtagcatcgaccgtaattcgtacttgggctatctgttgaacctgtatcgcgaggccatagggcaaactcaggtagatgagcaaacctatcaagaaattacccaagtgagccgcgctctgggtcgggaggacactggcagcttggaagccaccttaaacttcttgctgaccaaccggtcgcagaagatccctcctcagtattcgcttaccgcggaggaggaacggatcctgagatacgtgcagcagagcgtgggactgttcctaatgcaggagggggcgactcctactgctgcgctcgatatgacagcccgaaacatggagcccagcatgtatgccagtaaccggccttttatcaataaactgctagactacttacacagggcggctgctatgaactctgattatttcaccaatgctatcctgaacccccattggctgcccccacctgggttctatacgggcgagtatgacatgcccgaccccaatgacgggtttttatgggacgatgtggacagtagtgttttctccccgcctcctggttataacacttggaagaaggaaggtggcgatagaaggcactcttccgtgtcactgtccggagcaacgggtgctgcagcggctcccgaggccgcaagtcctttccctagtttgccattttcgctaaacagtgtacgcagcagtgagctgggaagaataacccgtcctcgcttgatcggcgaggaggagtatttgaacgactccctgttgagacccgagagggagaagaatttccccaacaacgggatagaaagcttggttgacaaaatgaaccgctggaagacgtacgcgcacgatcacagggacgatccccgggcgctgggggatagccggggcatcgctacccgtaaacgccagtggcacgacaggcagcggggcctggtgtgggccgatgatgattccgccgacgacagcagcgtgttggacttgggtgggagtggtggtaacccgttcgctcacctgcgcccccgcgtcgggcgcctgatgtaagaaaccgaaaataaatactcaccaaggccatggcgaccagcgtgcgttcgtttcttctctgttatagctagtatgatgaggcgaaccgtgctaggcggagcggtggtgtatccggagggtcctcctccttcgtacgagagcgtgatgcagcaggcggcggcggcggcgatgcagccaccactggaggctccctttgtaccccctcggtacctggcacctacggaggggagaaacagcattcgttactcggagctggcaccattgtatgataccacccggttgtatttggtggacaacaagtccgcggacatcgcctcactgaactatcagaacgaccacagcaacttcctcaccacggtggtgcaaaacaatgactttacccccacggaggccagcacccagaccatcaactttgacgagcggtcgcgatggggcggtcagctgaagactatcatgcacaccaacatgcccaacgtgaacgagtacatgtttagcaacaagttcaaagctcgggtgatggtgtctagaaaggctcctgaaggtgtcacagtagatgacaattatgatcacaagcaggatattttggaatatgagtggtttgagtttactctaccggaagggaacttctcagccacaatgaccattgacctaatgaacaatgccatcattgataattaccttgaagtgggcagacagaatggagtgttggagagtgacattggtgttaaatttgacaccaggaactttagactgggttgggatccggaaactaagttgattatgcctggggtttacacctatgaggcattccatcctgacattgtattgttgcctggttgcggagttgactttactgaaagtcgccttagtaacttgcttggtatcaggaaaagacacccattccaggagggttttaagatcttgtatgaggatcttgaagggggtaatatcccggccctgttggatgtagaagcctataagaacagtaagaaagaacgagaagccaaaacagaagccgctaaagctgctgctattgctaaagccaacatagttgtcagcgaccctgtaagggtggctaatgccgaagaagtcagaggagacaactatacagcttcatctgttgcaactgaagaatcgctattggctgctgtggccgaaactacagagaccaaactcactattaaacctgtagaaaaagacagcaagagtagaagttacaatgtcttggaagataaagtgaatacagcctaccgcagctggtacctgtcctacaactatggtgaccctgaaaaaggagtccgttcctggacactgctcaccacctcggatgtcacctgtggagcagagcaggtgtactggtcgctcccagacatgatgcaggaccctgtcacattccgttccacgagacaagtcagcaactatccagtggtaggtgcagagctcatgccggtcttctcaaagagtttctacaacgagcaagccgtgtactcccagcagcttcgccagtccacctcgctcacgcacgtcttcaaccgcttccctgagaaccagatcctcatccgcccgccagcgcccaccattaccaccgtcagtgaaaacgttcctgctctcacagatcacgggaccctgccgttgcgcagcagtatccggggagtccagcgcgtgaccgttactgacgccagacgccgcacctgcccctacgtctacaaggccctgggcatagtcgcgccgcgcgtcctttcaagccgcactttctaaaaaaaaatgtccattcttatctcacctagtaataacaccggttggggcctgcgcgcgccaagcaagatgtacggaggtgctcgcaaacgctctacacagcaccctgtgcgcgtgcgcgggcacttccgcgctccatggggcgccctcaagggtcgtacccgcactagaaccaccgtcgatgatgtgatcgaccaggtggtggccgatgctcgtaattatactcctactgcacctacatctactgtggatgcagttattgacagcgtagtggctgacgcccgcgcctatgctcgccggaagagcaggcggagacgcatcgccaggcgccaccgggctactcccgctatgcgagcggcaagagctctgctgaggagggccaaacgcgtggggcgaagagctatgcttagagcggccagacgcgcggcttcaggtgccagtgccggcaggtcccgcaggcgcgcagccacggcggcagcagcggccattgccaacatggcccaaccgcgaagaggcaatgtgtactgggtgcgcgacgccaccaccggccagcgcgtgcccgtgcgcacccgcccccctcgctcttagaagatactgagcagtctccgatgttgtgtcccagcgaggatgtccaagcgcaaatacaaggaagagatgctccaggtcatcgcgcctgaaatctacggtccgccggtgaaggatgaaaaaaagccccgcaaaatcaagcgggtcaaaaaggacaaaaaggaagaagatggcaatgatggtctggcggagtttgtacgcgagttcgccccaaggcggcgagtgcagtggcgtggacgcaaagtgcagcctgtgctgagacctggaaccacggtggtctttacgcccggcgagcgctccagcactgcttttaagcggtcctatgatgaggtgtatggggatgatgatattctggagcaggcggccgaccgcctgggcgagtttgcttatggcaagcgctcccgctcgagccccaaggaggaggcggtgtccattcccttggacaatgggaatcccacccctagtctcaagccagtcaccctgcagcaagtgctgcccgtgcctccacgcagaggcaacaagcgagagggtgaggatctgtatcccactatgcaattgatggtgcccaagcgccagcggctggaggacgtgctggagaaaatgaaagtggatcccgatatacaacctgaggtcaaagtgagacccatcaagcaggtggcgccaggtttgggagtacaaaccgtagacatcaagattcccaccgagtcaatggaagtccaaaccgaacctgcaaagcccacaaccacctccattgaggtgcaaacggatccctggatgaccgcacccgttacaactccagctgctgtcaacaccactcgaagatcccggcgaaagtacggtccagcaagtttgctgatgccaaattatgctctgcacccatccattattccaactccgggttaccgaggcactcgctactaccgcagcaggagcagcacttcccgccgtcgccgcaaaacacctgcaagtcgtagtcatcgtcgtcgccgccgccccaccagcaatctgactcccgctgctctggtgcggagagtgtatcgcgatggccgcgcggatcccctgacgttaccgcgcgtacgctaccatccaagcatcacaacttaacaactgttgccgctgcctccttgcagatatggccctcacttgccgccttcgtgtccccattactggctaccgaggaagaaactcgcgccgtagaagagggatgttggggcgcggaatgcgacgccacaggcggcggcgcgctatcagcaagaggctggggggtggctttctgcctgctctgatccccatcatagccgcggcgatcggggcgataccaggcatagcttccgtggcggttcaggcctcgcagcgccactgacattggaaaaacttataaataaaacagaatggactctgatgctcctggtcctgtgactatgtttttgtagagatggaagacatcaatttttcatccctggctccgcgacacggcacgaggccgtacatgggcacctggagcgacatcggcaccagccaactgaacgggggcgccttcaattggagcagtatctggagcgggcttaaaaattttggctctaccataaaaacctatgggaacaaagcttggaacagcagcacagggcaggcattgaaaaataagcttaaagagcaaaacttccaacagaaggtggttgatggaatcgcctctggtatcaatggggtggtggatctggccaaccaggccgtgcagaaacagataaacagccgccttgacccgccgccgtcagcccctggtgaaatggaagtggaggaagatctccctccccttgaaaagcggggcgacaagcgtccgcgccccgatctggaggagacactagtcacacgctcagacgacccgccctcctacgaggaggcagtgaagcttggaatgcccaccaccagacctgtagcccccatggctaccggggtaatgaaaccttctcagtcacaccgacccgctaccttggacttgcctccccctgctgttgcagcgcctgctcgcaagcctgtcgctaccccgaagcccaccaccgtacagcccgtcgccgtagccagaccgcgtcctgggggcactccacgtccgaatgcaaactggcagagtactctgaacagcatcgtgggtctgggcgtgcaaagtgtaaagcgccgtcgctgcttttaaattaaatatggagtagcgcttaacttgcctgtctgtgtgtatgtgtcatcatcacgccgccgccgcagcaacagcagaggagcaaggaagaggtcgcgcgccgaggctgagttgatttcaagatggccaccccatcgatgctgccccagtgggcatacatgcacatcgccggacaggatgcttcggagtacctgagtccgggtctggtgcagttcgcccgcgccacagacacctacttcaatctggggaacaagtttaggaaccccaccgtggcgcccacccatgatgtgaccaccgaccgcagtcagcggctgatgctgcgctttgtgcccgttgaccgggaagacaatacctacgcatacaaagttcgatacaccttggctgtgggcgacaacagagtgctggatatggccagcactttctttgacattcggggtgtgttggatagaggtcctagcttcaagccatattctggcactgcttacaactcattggcccctaagggcgctcccaatacatctcagtggcttaataagggagatgaagaggatggggaagacgaccaacaagctacatacacttttggcaatgcgccagtaaaagccgaagctgaaattacaaaagaaggactgccaataggtttggaagttccatctgaaggtggccctaaacccatttatgctgataaactgtatcagccagaacctcaggtgggagaggaatcttggactgatacggatggcacagatgaaaaatatggaggcagagcacttaaacctgaaactaaaatgaaaccctgctacgggtctttcgctaaacctactaatgttaaaggcgggcaggcaaaagtgaagaaagaagaagaaggcaaggttgaatatgacattgacatgaactttttcgacctaagatcacaaatgactggcctcaagcctaaaattgtaatgtatgcagaaaatgtggatctagaaactcctgacactcatgtggtgtacaaacctggagcttcagatgctagctctcatgcaaaccttggtcaacagtccatgcccaatagacctaactatattggcttcagggacaacttcatcggactcatgtactacaacagtactggcaacatgggagtgctggctggacaagcgtctcagctaaatgcagtggttgacttgcaagacagaaacacagaattgtcatatcaactcttgcttgattctctgggggacagaaccagatatttcagtatgtggaatcaagcagtggatagctatgacccagatgtgcgtgttattgagaaccatggtgtggaagatgaacttcctaactattgttttccattggatggtgtaggtccgcgaatagacagttacaagggaattgagacaaatggtgatgaaaccactacttggaaagatttagagccaaagggcataagtgaaattgctaagggaaatccgtttgccatggaaattaacctccaagctaatctctggagaagttttctttattccaatgtggctctgtatctcccagactcctacaaatacaccccagccaatgtcactcttccaactaacaccaacacttatgactacatgaatgggcgggtggttcccccatccctggtggatacctacgtaaacattggcgccagatggtctttggatgccatggacaatgtcaacccctttaaccatcaccgcaacgctggcctgcgataccggtccatgcttttgggcaatggtcgttacgtgcctttccacattcaagtgcctcagaaattctttgctgtgaagaacctgctgcttctacccggttcttacacctacgagtggaacttcagaaaggatgtgaacatggtcctgcagagttcccttggtaatgatctccgggtcgatggtgccagcataagttttaccagcatcaatctctatgccaccttcttccccatggcccacaacactgcctccacccttgaagccatgctgcgcaatgacaccaatgatcaatcattcaatgactacctttctgctgccaacatgctctaccccatcccggccaacgctaccaacgttcccatctccattccctctcgcaactgggccgccttcagaggctggtccttcaccagactcaaaaccaaggagactccctctttgggatcagggttcgatccctactttgtttactctggttctataccctacctggatggtaccttctaccttaaccacactttcaagaaagtctccatcatgtttgactcttcagtgagctggcctggtaatgacagattgctaagtccaaatgagttcgaaatcaagcgcacagttgatggggaaggctacaatgtggcccaatgtaacatgaccaaagactggttcctggtccagatgcttgccaactacaacattggataccagggcttctacgttcctgagggttacaaggatcgcatgtactccttcttcagaaacttccagcccatgagtagacaggtggttgatgagattaactacaaagactataaagctgtcgccgtaccctaccagcataataactctggctttgtgggttacatggctcctaccatgcgtcagggtcaagcgtaccctgctaactacccataccccctaattggaaccactgcagtaaccagtgtcacccagaaaaaattcctgtgcgacaggaccatgtggcgcatcccattctctagcaacttcatgtccatgggtgcccttacagacctgggacagaacttgctgtatgccaactcggcccatgcgctggacatgacttttgaggtggatcccatggatgagcccaccctgctttatcttcttttcgaagtcttcgacgtggtcagagtgcaccagccacaccgcggcgtcatcgaggccgtctacctgcgcacaccgttctcggccggcaacgccaccacataagaagcctcttgcttcttgcaagcagcagctgcagccatgtcatgcgggtccggaaacggctccagcgagcaagagctcaaagccatcgtccgagacctgggctgcggaccctatttcctgggaacctttgacaagcgtttcccggggttcatggcccccgacaagctcgcctgcgccatagtcaacactgccggacgcgagacggggggagagcactggctggcttttggttggaacccgcgctccaacacctgctacctttttgatccttttgggttctcggatgagcgactcaaacagatttaccagtttgagtacgaggggctcctgcgccgcagtgcccttgctaccaaagaccgctgcatcaccctggaaaagtccacccagagcgtgcagggcccgcgctcagccgcctgtggacttttttgctgtatgttccttcatgcctttgtgcactggcccgaccgccccatgaacggaaaccccaccatgaagttgctgactggggtgtcaaacagcatgctccaatcaccccaagtccagcccaccctgcgccgcaaccaggaggcgctatatcgcttcctaaacacccactcatcttactttcgttctcaccgcgcacgcattgaaagggccaccgcgtttgaccgtatggatatgcaataagtcatgtaaaaccgtgttcaataaaaagcattttatttttacatgcactaaggctctggttttttgctcattcgttttcatcattcactcagaaatcaaatgggttctggcgggagtcagagtgacccgtgggcagggagacgttgcggaactgtaacctgttctgccacttgaactcggggatcaccagcttgggaactggaatttcgggaaaggtgtcttgccacaactttctggtcagttgcagggcgccaagcaggtcaggagcagagatcttgaaatcacagttggggccggcattctggacacgggagttgcggtacactgggttgcaacactggaacaccatcaaggctgggtgtctcacgcttgccagcacggtcgggtcactgatggtagtcacatccaagtcttcagcattggccattccaaagggggtcatcttacaggtctgcctgcccatcacgggagcgcagcctggcttgtggttgcaatcgcaatgaatggggatcagcatcatcctggcttggtcgggggttatccctgggtacacggccttcatgaaggcttcgtactgcttgaaagcttcctgagccttacttccctcggtgtaaaacatcccacaggacttgctggaaaattggttagtagcacagttggcatcattcacacagcagcgggcatcgttgttggccaactggaccacatttctgccccagcggttctgggtgatcttggctctgtctgggttctccttcatagcgcgctgcccgttttcgctcgccacatccatctcgataatgtggtccttctggatcatgatagtgccatgcaggcatttcaccttgccttcgtaatcggtgcatccatgagcccacagagcgcacccggtgcactcccaattattgtgggcgatctcagaataagaatgcaccaatccctgcatgaatcttcccatcatcgctgtcagggtcttcatgctactaaatgtcagcgggatgccacggtgctcctcgttcacatactggtggcagatacgcttgtactgctcgtgctgctctggcatcagcttgaaagaggttctcaggtcattatccagcctatacctctccattagcacagccatcacttccatgcccttctcccaggcagataccaggggcaagctcaaaggattcctaacagcaatagaagtagctcctttagctatagggtcattcttgtcgatcttctcaacacttctcttgccatccttctcaatgatgcgcaccggggggtagctgaagcccacggccaccaactgagcctgttctctttcttcttcgctgtcctggctgatgtcttgcagagggacatgcttggtcttcctgggcttcttcttgggagggatcgggggaggactgttgctccgttccggagacagggatgaccgcgaagtttcgcttaccagtaccacctggctctcgatagaagaatcggaccccacgcgacggtaggtgttcctcttcgggggcagaggtggaggcgactgagatgggctgcggtccggccttggaggcggatggctggcagagcccattccgcgttcgggggtgtgctcccgttggcggtcgcttgactgatttcctccgcggctggccattgtgttctcctaggcagagaaacaacagacatggaaactcagccatcactgccaacatcgctgcaagcgccatcacacctcgcccccagcagcgacgaggaggagagcttaaccaccccaccacccagtcccgctaccaccacctctaccctcgatgatgaggaggaggtcgacgcagcccaggagatgcaggcgcaggataatgtgaaagcggaagagattgaggcagatgtcgagcaggacccgggctatgtgacaccggcggagcacgaggaggagctgaaacgttttctagacagagaggatgacgaccgcccagagcatcaccaggaggctggcctcggggatcatgttgccgactacctctccgggcttgggagggaggacgtgctcctcaaacatctagcaaggcagtcgatcatagttaaagacgcactactcaacctcaccgaagtgcctatcagtgtggaagagcttagccgcgcctacgagctgaacctcttttcgcctcagataccccccaagcggcagcgaaacggcacctgcgaggccaaccctcgactcaacttctatccagcttttactgtccccgaagtgctggccacctaccacatcttttttaagaaccaaaagattccagtctcctgccgcgccaaccgcacccgcgcagatgcccttctcaacttgggtccgggagctcgcttacctgatatagcttccttggaagaggttccaaagatctttgagggtctgggaagtgatgagactcgggccgcaaatgctctgcaacagggagagaatggtatggatgaacatcacagcgctctagtggaactggagggtgacaatgcccggcttgcagtgctcaagcgcagtatcgtggtcacccattttgcctaccccgctgttaacctgccgcccaaagtcatgagcgctgtcatggaccatctgctcatcaaacgagcaagtccactttcagaaaaccagaacatgcaggatccagacgcctcggaggagggcaagccggtagtcagtgacgagcagctatctcgctggctgggtaccaactccccccgagatttggaagaaagacgcaagcttatgatggctgtagtgctagtaactgttgagttggagtgtctgcgccgcttttttaccgaccccgagaccctgcgcaagctagaggagaacctgcactacaccttcagacatggcttcgtgcgccaggcatgcaagatctccaacgtggagctcaccaacctggtttcatacatgggcattttgcatgagaaccggctagggcagagcgttctgcacaccaccctgaagggggaggcccgccgcgactacatccgagactgtgtctacctctacctctgccatacctggcagactggtatgggtgtgtggcaacagtgtttggaagagcagaaccttaaagagctggacaagctcttgcagagatccctcaaagccctgtggacaggttttgacgagcgcaccgtcgcctcggacctggcggacatcatcttccccgagcgtcttagggttactctgcgaaacggcctgccagacttcatgagccagagcatgcttaacaactttcgctctttcatcctggaacgctccggtatcctgcctgccacctgctgtgcgctgccctccgactttgtgcctctcacctaccgcgagtgcccaccgccgctatggagccactgctacctattccgcctggccaactacctctcctaccactcggatgtgatagaggatgtgagcggagacggcctgctggaatgccactgccgatgcaatttatgcacaccccaccgctccctcgcctgcaacccccagttgctaagcgagacccagatcatcggcaccttcgagttgcagggtcccaacagtgaaggcgaggggtcttctccggggcagagtctgaaactgacaccggggctgtggacctccgcctacctgcgcaagtttcatcccgaggactatcatccctatgagatcaggttctatgaggaccagtcacatcctcccaaagtcgagctctcagcctgcgtcatcacccagggggcaattctggcccaattgcaagccatccaaaaatcccgccaagaatttctgctgaaaaagggaagcggggtctaccttgacccccagaccggtgaggagctcaacacaaggttcccccaggatgtcccatcgccgaggaagcaagaagctgaaggtgcagctgtcacccccagaggatatggaggaagactgggacagtcaggcagaggaggagatggaagattgggacagccaggcagaggaggtggacagcctggaggaagacagtttggaggaggaagacgaggaggcagaggaggtggaagaagcaaccgccgccaaacagttgtcatcggcggcggagacaagcaagtccccagacagcagcacggctaccatctccgctccgggtcggggggcccagcggcggcccaacagtagatgggacgagaccgggcgatttccaaacccgaccaccgcttccaagaccggtaagaaggagcgacagggatacaagtcctggcgtggacataaaaacgctatcatctcctgcttgcatgaatgcgggggcaacatatccttcacccggcgatacctgcttttccaccacggtgtgaacttcccccgcaatatcttgcattactaccgtcacctccacagcccctactgcagtcagcaagtcccggcaaccccgacagaaaaagacagcagcgacaacggtgaccagaaaagcagcagttagaaaatccacaacaagtgcagcaggaggaggactgaggatcacagcgaacgagccagcgcagaccagagagctgaggaaccggatctttccaaccctctatgccatcttccagcagagtcgggggcaagagcaggaattgaaagtaaaaaaccgatctctgcgctcgctcaccagaagttgtttgtatcacaagagcgaagaccaacttcagcgcactctcgaggacgccgaggctctcttcaacaagtactgcgcgctgactcttaaagagtagcccttgcccgcgctcattcgaaaacggcgggaatcacgtcacccttggcagctgtcctttgccctcgtcatgagtaaagagattcccacgccttacatgtggagctatcagccccaaatggggttggcagcaggtgcttcccaggactactccacccgcatgaattggcttagcgccgggccctcaatgatatcacgggttaatgatatacgagcttatcgaaaccagttactcctagaacagtcagctcttaccaccacaccccgccaacaccttaatccccgaaattggcccgccgccctggtgtaccaggaaaatcccgctcccaccaccgtactacttcctcgagacgcccaggccgaagttcagatgactaacgcaggtgtacagctggcgggcggttccgccctatgtcgtcaccggcctcaacagagtataaaacgcctggtgatcagaggccgaggtatccagctcaacgacgagtcggttagctcttcgcttggtctgcgaccagacggagtcttccagatcgccggctgtgggagatcttccttcactcctcgtcaggctgtgctgactttggagagttcgtcctcgcagccccgctcgggcggcatcggaactctccagtttgtggaggagtttactccctctgtctacttcaaccccttctccggctctcctggccagtacccggacgagttcataccgaacttcgacgcaatcagcgagtcagtggatggctatgattgatgtctaatggtggcgcggctgagctagctcgactgcgacacctagaccactgccgccgctttcgctgtttcgcccgggaactcaccgagttcatctacttcgaactctccgaggagcaccctcagggtccggcccacggagtgcggattaccatcgaagggggaatagactctcgcctgcatcgcatcttctcccagcggcccgtgctgattgagcgcgaccagggaaatacaaccatctccatctactgcatctgtaaccaccccggattgcatgaaagcctttgctgtcttgtttgtgctgagtttaataaaaactgagttaagaccttcctacggactaccgcttcttcaatcaggactttacaacaccaaccagatcttccagaagacccagacccttcctcctctgatccaggactctaactctaccttaccagcaccctccactactaaccttcccgaaactaacaagcttggatctcatctgcaacaccgcctttcacgaagccttctttctgccaatactaccactcccaaaaccggaggtgagctccgcggtcttcctactgacgacccctgggtggtagcgggttttgtaacgttaggattagttgcgggtgggcttgtgctaatcctttgctacctatacacaccttgctgtgcatatttagtcatattgtgctgttggtttaagaaatgggggccatactagtcgtgcttgctttactttcgcttttgggtctgggctctgctaatctcaatcctcttgatcacaatccatgtctagacttcgacccagaaaattgcacacttacttttgcacccgacacaagccgtctctgtggagttcttattaagtgcggatgggactgcaggtccgttgaaattacacataataacaaaacatggaacaataccttatccaccacatgggagccaggagttcccgagtggtatactgtctctgtccgaggtcctgacggttccattcgcattagtaacaacactttcattttttctgaaatgtgcgatctggccatgtttatgagcaaacagtatgacctatggcctcctagcaaagagaacattgtggcattttccattgcttattgcttggtaacatgcatcatcactgctatcatttgtgtgtgcatacacttgcttatagttattcgccctagacaaagcaatgaggaaaaagagaaaatgccttaacctttttcctcataccttttctttacagcatggcttctgttacagctctaattattgccagcattgtcactgtcgctcacgggcaaacaattgtccatattaccttaggacataatcacactcttgtagggcccccaattacttcagaggttatttggaccaaacttggaagtgttgattattttgatataatttgcaacaaaactgaaccaatatttgtaatctgtaacagacaaaatctcacgttaattaatgttagcaaaatttataacggttactattatggttatgatagatccagtagccaatataaaaattacttagttcgcataactcagcccaaatcaacagtgccaactatgacaataattaaaatggctaataaagcattagaaaattttacattaccaacaacgcccaatgaaaaaaacattccaaattcaatgattgcaattattgcggcggtggcattgggaatggcactaataataatatgcatgttcctatatgcttgttgctataaaaagtttcaacataaacaggatccactactaaattttaacatttaattttttatacagatgatttccactacaatttttatcattactagccttgcagctgtaacttatggccgttcacacctaactgtacctgttggctcaacatgtacactacaaggaccccaagaaggctatgtcacttggtggagaatatatgataatggagggttcgctagaccatgtgatcagcctggtacaaaattttcatgcaacggaagagacttgaccattattaacataacattaaatgagcaaggcttctattatggaaccaactataaaaatagtttagattacaacattattgtagtgccagccaccacttctgctccccgcaaatccactttctctagcagcagtgccaaagcaagcacaattcctaaaacagcttctgctatgttaaagcttcgaaaaatcgctttaagtaattccacagcagctcccaatacaattcctaaatcaacaattggcatcattactgccgtggtagtgggattaatgattatatttttgtgcataatgtactacgcctgctgctatagaaaacatgaacaaaaaggtgatgcattactaaattttgatatttaattttttatagaattatgatattgtttcaatccaatgccactaacactatcaatgtgcagactactttaaaacatgacatggaaaaccacactacctcctatgcatacacaaatattcagcctaaatacgctatgcaactagaaatcaccatactaattgtaattggaattcttatactatctgttattctttattttatattctgccgtcaaatacccaatgttcatagaaattctaaaagacgtcccatctattctcctatgattagtcgtccccatatggctctgaatgaaatctaagatctttttttttcttttacagtatggtgaacatcaatcatgattcctagaaatttcttcttcaccatactcatctgtgctttcaatgtctgtgctactttcacagcagtagccactgcaagcccagactgtataggaccatttgcttcctatgcactttttgcctttgttacttgcatctgcgtgtgtagcatagtctgcctggttattaattttttccaactggtagactggatctttgtgcgaattgcctacctacgtcaccatcccgaataccgcaatcaaaatgttgcggcacttcttaggcttatttaaaaccatgcaggctatgctaccagttattttaattctgctactaccctgcattgccctaccttccaccgccactcgcgctacacctgaacaacttagaaaatgcaaatttcaacaaccatggtcatttcttgattgctaccatgaaaaatctgattttcccacatactggatagtgattgttggaataattaacatactttcatgtacctttttctcaatcacaatataccccacatttaattttgggtggaattctcccaatgcactgggttacccacaagagctagatgaacatatcccactacaacacatacaacaaccactagcattggtagagtatgaaaatgagccacaaccttcactgcctcctgctattagttacttcaacctaaccggcggagatgactgaaatactcaccacctccaattccgccgaggatctgcttgatatggacggccgcgcctcagaacagcgactcgcccaactacgcatccgccagcagcaggaacgcgtgaccaaagagctcagagatgtcatccaaattcaccaatgcaaaaaaggcatattttgtttggtaaaacaagccaagatatcctacgagatcaccgctactgaccatcgcctctcttacgaacttggcccccaacgacaaaaatttacatgcatggtgggaatcaaccctatagttatcacccagcaaagtggagatactaagggttgcattcactgctcttgcgattccaccgagtgcacctacaccctgctgaagaccctatgcggcctaagagacctgctacccatgaattaaaaattaataaaaaattacttacttgaaatcagcaataaggtctctgttgaaattttttcccagcagcacctcgcttccctcttcccaactctggtattctaaaccccgttcagcggcatactttctccatactttaaaggggatgtcaaattttagctcctctcctgtacccacgatcttcatgtctttcttcccagatgaccaagagagtccggctcagtgattccttcaaccctgtctacccctatgaagacgaaagcacctcccaacacccctttataaacccagggtttatttccccaaatggctttacacaaagcccagacggagttcttactttaaattgtttaaccccactaacaaccacaggcgggcctttacagttaaaagtgggagggggacttatagtggatgacactgatgggaccttacaagaaaacatacgtgttacagcacccattactaaaaataatcattctgtagaactatccattggaaatggattagaaacacaaaacaataaactatgtgccaaattgggaaatgggttaaaatttaacaacggtgacatttgtataaaggatagtattaacaccttatggactggaataaagcctccacctaactgtcaaatagtggaaaacactgatacaaacgatggcaaacttactttagtattagtaaaaaacggaggacttgttaatggctacgtatctctagttggtgtatcagacactgtgaaccaaatgttcacacaaaagtcagcaaccatacaattaagattatatttcgactcttctggaaatctattaactgatgaatcaaacttaaaaattccacttaaaaataaatcttctacagcaaccagtgaagctgcaaccagcagcaaagcctttatgccaagtactacagcttatccctttaacaccactactagggatagtgaaaactatattcatggaatatgttactatatgactagttatgatagaagtctagttcccttaaacatttctataatgctaaacagccgtacgatttcttccaatgttgcctatgccatacaatttgaatggaatctaaatgcaaaagaatctccagaaagcaacatagctacgctgaccacatccccctttttcttttcttatattagagaagacgacaactaaaaaataaagtttaagtgtttttatttaaaaatcacaaaattcgagtagttattttgcctcccccttcccatttaacagaatacaccaatctctccccacgcacagctttaaacatttggataccattagagatagacatagttttagtttccacattccaaacagtttcagagcgagccaatctggggtcagtgatacataaaaatgcatcgggatagtcttttaaagcgctttcacagtccaactgctgcggatgcgactccggagtctggatcacagtcatctggaagaagaacgatgggaatcataatccgaaaacggaatcgggcgattgtgtctcatcaaacccacaagcagccgctgtctgcgtcgctccgtgcgactgctgtttatgggatcggggtctgcagtgtcctgaagcatgattttaatagcccttaacattaactttctggtgcgatgcgcgcagcaacgcattctgatttcactgagattactacagtatgtacagcacattatcacaatattgtttaataaaccataattaaaagcgctccagccaaaactcatatctgatacaatcgcccctgcatgaccatcataccaaattttaatataaattaaatgtcgttccctcaaaaacacactacccacatacatgatctcttttggcatgtgcatattaacaatctgtctgtaccatggacaacgttggttaatcatgcaacccaatataaccttccggaaccacactgccaacaccgctcccccagccatgcattgaagtgaaccctgctgattacaatgacaatgaagaacccaattctctcgaccatgaatcacttgagactgaaaaatatctatagtagcacaacaaagacataaatgcatgcatcttctcataatttttaactcatctggatttaaaaacatatcccaaggaatgggaaactcttgcaaaacagtaaagctggcagaacaaggaagaccacgaacacaacttacactatgcatagtcatagtatcacaatctggcaacagcgggtggtcttcagtcatagaagctcgggtttcattttcctcacatcgtggtaactgggctctggtgtaagggtgatgtctggcgcatgatgtcgagcgtgcgcgcaaccttgtcataatggagttgtttcctgacattctcgtattttgtatagcaaaacgcggccctggcacaacacactcttcttcgtcttctatcctgccgcttagtgtgttccgtctgataattcaagtacagccacactcttaagttggtcaaaagaatgctggcttcagttgtaatcaaaactccatcatatttaattgttctaaggaaatcatccacggtagcatatgcaaatcccaaccaagcaatgcaactggattgcgtttcaagcagcagaggagagggaagagacggaagaatcatgttaatttttattccaaacgatctcgcagtacttcaaattgtagatcgcgcagatggcatctatcgcccccactgtgttggtgaaaaagcacagctaaatcaaaagaaatgcgattttcaaggtgctcaacggtggcttccaacaaagcctccacgcgcacatccaaaaacaaaagaataccaaaagaaggagcattttctaactcctcaaacatcatattacattcctgcaccattcccagataattttcagctttccagccttgaattattcgtgtcagttcttgtggtaaatccaaaccacacattacaaacaggtcccggagggcgccctccaccaccattcttaaacacaccctcataatgacaaaatatcttgctcctgtgtcacctgtagcaaattaagaatggcatcatcaattgacatgcccttggctctaagttcttctctaagttctagttgtaaatactctctcatattatcaccaaactgcttagccaaaagccccccgggaacaatagcaggggacgctacagtgcagtacaagcgcagacctccccaattggctccagcaaaaacaagattagaataagcatactgggaaccaccagtaatatcatcaaagttgctggaaatataatcaggcagaatttcttgtaaaaattgaataaaagaaaaattttccaaagaaacattcaaaatctctgggatgcaaatgcaataggttaccgcgctgcgctccaacattgttagttttgaattagtctgcaaaataaaagaaacaagcgtcatatcatagtagcctgtcgaacaggtggataaatcagtctttccatcacaagacaagccacagggtctccagctcgaccctcgtaaaacctgtcatcgtgattaaacaacagcaccgaaagttcctcgcggtggccagcatgaataattcttgatgaagcatataatccagacatgttagcatcagttaaagagaaaaaacagccaacatagcctctgggtataattatgcttaatcttaagtatagcaaagccacccctcgcggatacaaagtaaaaggcacaggagaataaaaaatataattatttctctgctgctgttcaggcaacgtcgcccccggtccatctaaatacacatacaaagcctcatcagccatggcttaccagacaaagtacagcgggcgcacaaagcacaagctctaaagaagctctaaagacactcttcaacctctccacaatatatacacaagccctaaactgacgtaatgggagtaaagtgtaaaaaatcccgccaagcccaacacacaccccgaaactgcgtcagcagggaaaagtacagtttcacttccgcattcccaacaagcgtaagttcctctttctcatggtacgtcacatccgattaacttgcaacgtcattttcccacggtcgcaccgccccttttagccgttcaccccgcagccaatcaccacacagcgcgcacttttttaaattacctcatttacatattggcaccattccatctataaggtatattatattgattg

SEQ ID NO: 208 - DNA, 35938 bp, Human adenovirus 5
catcatcaataatataccttattttggattgaagccaatatgataatgagggggtggagtttgtgacgtggcgcggggcgtgggaacggggcgggtgacgtagtagtgtggcggaagtgtgatgttgcaagtgtggcggaacacatgtaagcgacggatgtggcaaaagtgacgtttttggtgtgcgccggtgtacacaggaagtgacaattttcgcgcggttttaggcggatgttgtagtaaatttgggcgtaaccgagtaagatttggccattttcgcgggaaaactgaataagaggaagtgaaatctgaataattttgtgttactcatagcgcgtaatatttgtctagggccgcggggactttgaccgtttacgtggagactcgcccaggtgtttttctcaggtgttttccgcgttccgggtcaaagttggcgttttattattatagtcagctgacgtgtagtgtatttatacccggtgagttcctcaagaggccactcttgagtgccagcgagtagagttttctcctccgagccgctccgacaccgggactgaaaatgagacatattatctgccacggaggtgttattaccgaagaaatggccgccagtcttttggaccagctgatcgaagaggtactggctgataatcttccacctcctagccattttgaaccacctacccttcacgaactgtatgatttagacgtgacggcccccgaagatcccaacgaggaggcggtttcgcagatttttcccgactctgtaatgttggcggtgcaggaagggattgacttactcacttttccgccggcgcccggttctccggagccgcctcacctttcccggcagcccgagcagccggagcagagagccttgggtccggtttctatgccaaaccttgtaccggaggtgatcgatcttacctgccacgaggctggctttccacccagtgacgacgaggatgaagagggtgaggagtttgtgttagattatgtggagcaccccgggcacggttgcaggtcttgtcattatcaccggaggaatacgggggacccagatattatgtgttcgctttgctatatgaggacctgtggcatgtttgtctacagtaagtgaaaattatgggcagtgggtgatagagtggtgggtttggtgtggtaattttttttttaatttttacagttttgtggtttaaagaattttgtattgtgatttttttaaaaggtcctgtgtctgaacctgagcctgagcccgagccagaaccggagcctgcaagacctacccgccgtcctaaaatggcgcctgctatcctgagacgcccgacatcacctgtgtctagagaatgcaatagtagtacggatagctgtgactccggtccttctaacacacctcctgagatacacccggtggtcccgctgtgccccattaaaccagttgccgtgagagttggtgggcgtcgccaggctgtggaatgtatcgaggacttgcttaacgagcctgggcaacctttggacttgagctgtaaacgccccaggccataaggtgtaaacctgtgattgcgtgtgtggttaacgcctttgtttgctgaatgagttgatgtaagtttaataaagggtgagataatgtttaacttgcatggcgtgttaaatggggcggggcttaaagggtatataatgcgccgtgggctaatcttggttacatctgacctcatggaggcttgggagtgtttggaagatttttctgctgtgcgtaacttgctggaacagagctctaacagtacctcttggttttggaggtttctgtggggctcatcccaggcaaagttagtctgcagaattaaggaggattacaagtgggaatttgaagagcttttgaaatcctgtggtgagctgtttgattctttgaatctgggtcaccaggcgcttttccaagagaaggtcatcaagactttggatttttccacaccggggcgcgctgcggctgctgttgcttttttgagttttataaaggataaatggagcgaagaaacccatctgagcggggggtacctgctggattttctggccatgcatctgtggagagcggttgtgagacacaagaatcgcctgctactgttgtcttccgtccgcccggcgataataccgacggaggagcagcagcagcagcaggaggaagccaggcggcggcggcaggagcagagcccatggaacccgagagccggcctggaccctcgggaatgaatgttgtacaggtggctgaactgtatccagaactgagacgcattttgacaattacagaggatgggcaggggctaaagggggtaaagagggagcggggggcttgtgaggctacagaggaggctaggaatctagcttttagcttaatgaccagacaccgtcctgagtgtattacttttcaacagatcaaggataattgcgctaatgagcttgatctgctggcgcagaagtattccatagagcagctgaccacttactggctgcagccaggggatgattttgaggaggctattagggtatatgcaaaggtggcacttaggccagattgcaagtacaagatcagcaaacttgtaaatatcaggaattgttgctacatttctgggaacggggccgaggtggagatagatacggaggatagggtggcctttagatgtagcatgataaatatgtggccgggggtgcttggcatggacggggtggttattatgaatgtaaggtttactggccccaattttagcggtacggttttcctggccaataccaaccttatcctacacggtgtaagcttctatgggtttaacaatacctgtgtggaagcctggaccgatgtaagggttcggggctgtgccttttactgctgctggaagggggtggtgtgtcgccccaaaagcagggcttcaattaagaaatgcctctttgaaaggtgtaccttgggtatcctgtctgagggtaactccagggtgcgccacaatgtggcctccgactgtggttgcttcatgctagtgaaaagcgtggctgtgattaagcataacatggtatgtggcaactgcgaggacagggcctctcagatgctgacctgctcggacggcaactgtcacctgctgaagaccattcacgtagccagccactctcgcaaggcctggccagtgtttgagcataacatactgacccgctgttccttgcatttgggtaacaggaggggggtgttcctaccttaccaatgcaatttgagtcacactaagatattgcttgagcccgagagcatgtccaaggtgaacctgaacggggtgtttgacatgaccatgaagatctggaaggtgctgaggtacgatgagacccgcaccaggtgcagaccctgcgagtgtggcggtaaacatattaggaaccagcctgtgatgctggatgtgaccgaggagctgaggcccgatcacttggtgctggcctgcacccgcgctgagtttggctctagcgatgaagatacagattgaggtactgaaatgtgtgggcgtggcttaagggtgggaaagaatatataaggtgggggtcttatgtagttttgtatctgttttgcagcagccgccgccgccatgagcaccaactcgtttgatggaagcattgtgagctcatatttgacaacgcgcatgcccccatgggccggggtgcgtcagaatgtgatgggctccagcattgatggtcgccccgtcctgcccgcaaactctactaccttgacctacgagaccgtgtctggaacgccgttggagactgcagcctccgccgccgcttcagccgctgcagccaccgcccgcgggattgtgactgactttgctttcctgagcccgcttgcaagcagtgcagcttcccgttcatccgcccgcgatgacaagttgacggctcttttggcacaattggattctttgacccgggaacttaatgtcgtttctcagcagctgttggatctgcgccagcaggtttctgccctgaaggcttcctcccctcccaatgcggtttaaaacataaataaaaaaccagactctgtttggatttggatcaagcaagtgtcttgctgtctttatttaggggttttgcgcgcgcggtaggcccgggaccagcggtctcggtcgttgagggtcctgtgtattttttccaggacgtggtaaaggtgactctggatgttcagatacatgggcataagcccgtctctggggtggaggtagcaccactgcagagcttcatgctgcggggtggtgttgtagatgatccagtcgtagcaggagcgctgggcgtggtgcctaaaaatgtctttcagtagcaagctgattgccaggggcaggcccttggtgtaagtgtttacaaagcggttaagctgggatgggtgcatacgtggggatatgagatgcatcttggactgtatttttaggttggctatgttcccagccatatccctccggggattcatgttgtgcagaaccaccagcacagtgtatccggtgcacttgggaaatttgtcatgtagcttagaaggaaatgcgtggaagaacttggagacgcccttgtgacctccaagattttccatgcattcgtccataatgatggcaatgggcccacgggcggcggcctgggcgaagatatttctgggatcactaacgtcatagttgtgttccaggatgagatcgtcataggccatttttacaaagcgcgggcggagggtgccagactgcggtataatggttccatccggcccaggggcgtagttaccctcacagatttgcatttcccacgctttgagttcagatggggggatcatgtctacctgcggggcgatgaagaaaacggtttccggggtaggggagatcagctgggaagaaagcaggttcctgagcagctgcgacttaccgcagccggtgggcccgtaaatcacacctattaccgggtgcaactggtagttaagagagctgcagctgccgtcatccctgagcaggggggccacttcgttaagcatgtccctgactcgcatgttttccctgaccaaatccgccagaaggcgctcgccgcccagcgatagcagttcttgcaaggaagcaaagtttttcaacggtttgagaccgtccgccgtaggcatgcttttgagcgtttgaccaagcagttccaggcggtcccacagctcggtcacctgctctacggcatctcgatccagcatatctcctcgtttcgcgggttggggcggctttcgctgtacggcagtagtcggtgctcgtccagacgggccagggtcatgtctttccacgggcgcagggtcctcgtcagcgtagtctgggtcacggtgaaggggtgcgctccgggctgcgcgctggccagggtgcgcttgaggctggtcctgctggtgctgaagcgctgccggtcttcgccctgcgcgtcggccaggtagcatttgaccatggtgtcatagtccagcccctccgcggcgtggcccttggcgcgcagcttgcccttggaggaggcgccgcacgaggggcagtgcagacttttgagggcgtagagcttgggcgcgagaaataccgattccggggagtaggcatccgcgccgcaggccccgcagacggtctcgcattccacgagccaggtgagctctggccgttcggggtcaaaaaccaggtttcccccatgctttttgatgcgtttcttacctctggtttccatgagccggtgtccacgctcggtgacgaaaaggctgtccgtgtccccgtatacagacttgagaggcctgtcctcgagcggtgttccgcggtcctcctcgtatagaaactcggaccactctgagacaaaggctcgcgtccaggccagcacgaaggaggctaagtgggaggggtagcggtcgttgtccactagggggtccactcgctccagggtgtgaagacacatgtcgccctcttcggcatcaaggaaggtgattggtttgtaggtgtaggccacgtgaccgggtgttcctgaaggggggctataaaagggggtgggggcgcgttcgtcctcactctcttccgcatcgctgtctgcgagggccagctgttggggtgagtactccctctgaaaagcgggcatgacttctgcgctaagattgtcagtttccaaaaacgaggaggatttgatattcacctggcccgcggtgatgcctttgagggtggccgcatccatctggtcagaaaagacaatctttttgttgtcaagcttggtggcaaacgacccgtagagggcgttggacagcaacttggcgatggagcgcagggtttggtttttgtcgcgatcggcgcgctccttggccgcgatgtttagctgcacgtattcgcgcgcaacgcaccgccattcgggaaagacggtggtgcgctcgtcgggcaccaggtgcacgcgccaaccgcggttgtgcagggtgacaaggtcaacgctggtggctacctctccgcgtaggcgctcgttggtccagcagaggcggccgcccttgcgcgagcagaatggcggtagggggtctagctgcgtctcgtccggggggtctgcgtccacggtaaagaccccgggcagcaggcgcgcgtcgaagtagtctatcttgcatccttgcaagtctagcgcctgctgccatgcgcgggcggcaagcgcgcgctcgtatgggttgagtgggggaccccatggcatggggtgggtgagcgcggaggcgtacatgccgcaaatgtcgtaaacgtagaggggctctctgagtattccaagatatgtagggtagcatcttccaccgcggatgctggcgcgcacgtaatcgtatagttcgtgcgagggagcgaggaggtcgggaccgaggttgctacgggcgggctgctctgctcggaagactatctgcctgaagatggcatgtgagttggatgatatggttggacgctggaagacgttgaagctggcgtctgtgagacctaccgcgtcacgcacgaaggaggcgtaggagtcgcgcagcttgttgaccagctcggcggtgacctgcacgtctagggcgcagtagtccagggtttccttgatgatgtcatacttatcctgtcccttttttttccacagctcgcggttgaggacaaactcttcgcggtctttccagtactcttggatcggaaacccgtcggcctccgaacggtaagagcctagcatgtagaactggttgacggcctggtaggcgcagcatcccttttctacgggtagcgcgtatgcctgcgcggccttccggagcgaggtgtgggtgagcgcaaaggtgtccctgaccatgactttgaggtactggtatttgaagtcagtgtcgtcgcatccgccctgctcccagagcaaaaagtccgtgcgctttttggaacgcggatttggcagggcgaaggtgacatcgttgaagagtatctttcccgcgcgaggcataaagttgcgtgtgatgcggaagggtcccggcacctcggaacggttgttaattacctgggcggcgagcacgatctcgtcaaagccgttgatgttgtggcccacaatgtaaagttccaagaagcgcgggatgcccttgatggaaggcaattttttaagttcctcgtaggtgagctcttcaggggagctgagcccgtgctctgaaagggcccagtctgcaagatgagggttggaagcgacgaatgagctccacaggtcacgggccattagcatttgcaggtggtcgcgaaaggtcctaaactggcgacctatggccattttttctggggtgatgcagtagaaggtaagcgggtcttgttcccagcggtcccatccaaggttcgcggctaggtctcgcgcggcagtcactagaggctcatctccgccgaacttcatgaccagcatgaagggcacgagctgcttcccaaaggcccccatccaagtataggtctctacatcgtaggtgacaaagagacgctcggtgcgaggatgcgagccgatcgggaagaactggatctcccgccaccaattggaggagtggctattgatgtggtgaaagtagaagtccctgcgacgggccgaacactcgtgctggcttttgtaaaaacgtgcgcagtactggcagcggtgcacgggctgtacatcctgcacgaggttgacctgacgaccgcgcacaaggaagcagagtgggaatttgagcccctcgcctggcgggtttggctggtggtcttctacttcggctgcttgtccttgaccgtctggctgctcgaggggagttacggtggatcggaccaccacgccgcgcgagcccaaagtccagatgtccgcgcgcggcggtcggagcttgatgacaacatcgcgcagatgggagctgtccatggtctggagctcccgcggcgtcaggtcaggcgggagctcctgcaggtttacctcgcatagacgggtcagggcgcgggctagatccaggtgatacctaatttccaggggctggttggtggcggcgtcgatggcttgcaagaggccgcatccccgcggcgcgactacggtaccgcgcggcgggcggtgggccgcgggggtgtccttggatgatgcatctaaaagcggtgacgcgggcgagcccccggaggtagggggggctccggacccgccgggagagggggcaggggcacgtcggcgccgcgcgcgggcaggagctggtgctgcgcgcgtaggttgctggcgaacgcgacgacgcggcggttgatctcctgaatctggcgcctctgcgtgaagacgacgggcccggtgagcttgagcctgaaagagagttcgacagaatcaatttcggtgtcgttgacggcggcctggcgcaaaatctcctgcacgtctcctgagttgtcttgataggcgatctcggccatgaactgctcgatctcttcctcctggagatctccgcgtccggctcgctccacggtggcggcgaggtcgttggaaatgcgggccatgagctgcgagaaggcgttgaggcctccctcgttccagacgcggctgtagaccacgcccccttcggcatcgcgggcgcgcatgaccacctgcgcgagattgagctccacgtgccgggcgaagacggcgtagtttcgcaggcgctgaaagaggtagttgagggtggtggcggtgtgttctgccacgaagaagtacataacccagcgtcgcaacgtggattcgttgatatcccccaaggcctcaaggcgctccatggcctcgtagaagtccacggcgaagttgaaaaactgggagttgcgcgccgacacggttaactcctcctccagaagacggatgagctcggcgacagtgtcgcgcacctcgcgctcaaaggctacaggggcctcttcttcttcttcaatctcctcttccataagggcctccccttcttcttcttctggcggcggtgggggaggggggacacggcggcgacgacggcgcaccgggaggcggtcgacaaagcgctcgatcatctccccgcggcgacggcgcatggtctcggtgacggcgcggccgttctcgcgggggcgcagttggaagacgccgcccgtcatgtcccggttatgggttggcggggggctgccatgcggcagggatacggcgctaacgatgcatctcaacaattgttgtgtaggtactccgccgccgagggacctgagcgagtccgcatcgaccggatcggaaaacctctcgagaaaggcgtctaaccagtcacagtcgcaaggtaggctgagcaccgtggcgggcggcagcgggcggcggtcggggttgtttctggcggaggtgctgctgatgatgtaattaaagtaggcggtcttgagacggcggatggtcgacagaagcaccatgtccttgggtccggcctgctgaatgcgcaggcggtcggccatgccccaggcttcgttttgacatcggcgcaggtctttgtagtagtcttgcatgagcctttctaccggcacttcttcttctccttcctcttgtcctgcatctcttgcatctatcgctgcggcggcggcggagtttggccgtaggtggcgccctcttcctcccatgcgtgtgaccccgaagcccctcatcggctgaagcagggctaggtcggcgacaacgcgctcggctaatatggcctgctgcacctgcgtgagggtagactggaagtcatccatgtccacaaagcggtggtatgcgcccgtgttgatggtgtaagtgcagttggccataacggaccagttaacggtctggtgacccggctgcgagagctcggtgtacctgagacgcgagtaagccctcgagtcaaatacgtagtcgttgcaagtccgcaccaggtactggtatcccaccaaaaagtgcggcggcggctggcggtagaggggccagcgtagggtggccggggctccgggggcgagatcttccaacataaggcgatgatatccgtagatgtacctggacatccaggtgatgccggcggcggtggtggaggcgcgcggaaagtcgcggacgcggttccagatgttgcgcagcggcaaaaagtgctccatggtcgggacgctctggccggtcaggcgcgcgcaatcgttgacgctctagaccgtgcaaaaggagagcctgtaagcgggcactcttccgtggtctggtggataaattcgcaagggtatcatggcggacgaccggggttcgagccccgtatccggccgtccgccgtgatccatgcggttaccgcccgcgtgtcgaacccaggtgtgcgacgtcagacaacgggggagtgctccttttggcttccttccaggcgcggcggctgctgcgctagcttttttggccactggccgcgcgcagcgtaagcggttaggctggaaagcgaaagcattaagtggctcgctccctgtagccggagggttattttccaagggttgagtcgcgggacccccggttcgagtctcggaccggccggactgcggcgaacgggggtttgcctccccgtcatgcaagaccccgcttgcaaattcctccggaaacagggacgagccccttttttgcttttcccagatgcatccggtgctgcggcagatgcgcccccctcctcagcagcggcaagagcaagagcagcggcagacatgcagggcaccctcccctcctcctaccgcgtcaggaggggcgacatccgcggttgacgcggcagcagatggtgattacgaacccccgcggcgccgggcccggcactacctggacttggaggagggcgagggcctggcgcggctaggagcgccctctcctgagcggtacccaagggtgcagctgaagcgtgatacgcgtgaggcgtacgtgccgcggcagaacctgtttcgcgaccgcgagggagaggagcccgaggagatgcgggatcgaaagttccacgcagggcgcgagctgcggcatggcctgaatcgcgagcggttgctgcgcgaggaggactttgagcccgacgcgcgaaccgggattagtcccgcgcgcgcacacgtggcggccgccgacctggtaaccgcatacgagcagacggtgaaccaggagattaactttcaaaaaagctttaacaaccacgtgcgtacgcttgtggcgcgcgaggaggtggctataggactgatgcatctgtgggactttgtaagcgcgctggagcaaaacccaaatagcaagccgctcatggcgcagctgttccttatagtgcagcacagcagggacaacgaggcattcagggatgcgctgctaaacatagtagagcccgagggccgctggctgctcgatttgataaacatcctgcagagcatagtggtgcaggagcgcagcttgagcctggctgacaaggtggccgccatcaactattccatgcttagcctgggcaagttttacgcccgcaagatataccataccccttacgttcccatagacaaggaggtaaagatcgaggggttctacatgcgcatggcgctgaaggtgcttaccttgagcgacgacctgggcgtttatcgcaacgagcgcatccacaaggccgtgagcgtgagccggcggcgcgagctcagcgaccgcgagctgatgcacagcctgcaaagggccctggctggcacgggcagcggcgatagagaggccgagtcctactttgacgcgggcgctgacctgcgctgggccccaagccgacgcgccctggaggcagctggggccggacctgggctggcggtggcacccgcgcgcgctggcaacgtcggcggcgtggaggaatatgacgaggacgatgagtacgagccagaggacggcgagtactaagcggtgatgtttctgatcagatgatgcaagacgcaacggacccggcggtgcgggcggcgctgcagagccagccgtccggccttaactccacggacgactggcgccaggtcatggaccgcatcatgtcgctgactgcgcgcaatcctgacgcgttccggcagcagccgcaggccaaccggctctccgcaattctggaagcggtggtcccggcgcgcgcaaaccccacgcacgagaaggtgctggcgatcgtaaacgcgctggccgaaaacagggccatccggcccgacgaggccggcctggtctacgacgcgctgcttcagcgcgtggctcgttacaacagcggcaacgtgcagaccaacctggaccggctggtgggggatgtgcgcgaggccgtggcgcagcgtgagcgcgcgcagcagcagggcaacctgggctccatggttgcactaaacgccttcctgagtacacagcccgccaacgtgccgcggggacaggaggactacaccaactttgtgagcgcactgcggctaatggtgactgagacaccgcaaagtgaggtgtaccagtctgggccagactattttttccagaccagtagacaaggcctgcagaccgtaaacctgagccaggctttcaaaaacttgcaggggctgtggggggtgcgggctcccacaggcgaccgcgcgaccgtgtctagcttgctgacgcccaactcgcgcctgttgctgctgctaatagcgcccttcacggacagtggcagcgtgtcccgggacacatacctaggtcacttgctgacactgtaccgcgaggccataggtcaggcgcatgtggacgagcatactttccaggagattacaagtgtcagccgcgcgctggggcaggaggacacgggcagcctggaggcaaccctaaactacctgctgaccaaccggcggcagaagatcccctcgttgcacagtttaaacagcgaggaggagcgcattttgcgctacgtgcagcagagcgtgagccttaacctgatgcgcgacggggtaacgcccagcgtggcgctggacatgaccgcgcgcaacatggaaccgggcatgtatgcctcaaaccggccgtttatcaaccgcctaatggactacttgcatcgcgcggccgccgtgaaccccgagtatttcaccaatgccatcttgaacccgcactggctaccgccccctggtttctacaccgggggattcgaggtgcccgagggtaacgatggattcctctgggacgacatagacgacagcgtgttttccccgcaaccgcagaccctgctagagttgcaacagcgcgagcaggcagaggcggcgctgcgaaaggaaagcttccgcaggccaagcagcttgtccgatctaggcgctgcggccccgcggtcagatgctagtagcccatttccaagcttgatagggtctcttaccagcactcgcaccacccgcccgcgcctgctgggcgaggaggagtacctaaacaactcgctgctgcagccgcagcgcgaaaaaaacctgcctccggcatttcccaacaacgggatagagagcctagtggacaagatgagtagatggaagacgtacgcgcaggagcacagggacgtgccaggcccgcgcccgcccacccgtcgtcaaaggcacgaccgtcagcggggtctggtgtgggaggacgatgactcggcagacgacagcagcgtcctggatttgggagggagtggcaacccgtttgcgcaccttcgccccaggctggggagaatgttttaaaaaaaaaaaagcatgatgcaaaataaaaaactcaccaaggccatggcaccgagcgttggttttcttgtattccccttagtatgcggcgcgcggcgatgtatgaggaaggtcctcctccctcctacgagagtgtggtgagcgcggcgccagtggcggcggcgctgggttctcccttcgatgctcccctggacccgccgtttgtgcctccgcggtacctgcggcctaccggggggagaaacagcatccgttactctgagttggcacccctattcgacaccacccgtgtgtacctggtggacaacaagtcaacggatgtggcatccctgaactaccagaacgaccacagcaactttctgaccacggtcattcaaaacaatgactacagcccgggggaggcaagcacacagaccatcaatcttgacgaccggtcgcactggggcggcgacctgaaaaccatcctgcataccaacatgccaaatgtgaacgagttcatgtttaccaataagtttaaggcgcgggtgatggtgtcgcgcttgcctactaaggacaatcaggtggagctgaaatacgagtgggtggagttcacgctgcccgagggcaactactccgagaccatgaccatagaccttatgaacaacgcgatcgtggagcactacttgaaagtgggcagacagaacggggttctggaaagcgacatcggggtaaagtttgacacccgcaacttcagactggggtttgaccccgtcactggtcttgtcatgcctggggtatatacaaacgaagccttccatccagacatcattttgctgccaggatgcggggtggacttcacccacagccgcctgagcaacttgttgggcatccgcaagcggcaacccttccaggagggctttaggatcacctacgatgatctggagggtggtaacattcccgcactgttggatgtggacgcctaccaggcgagcttgaaagatgacaccgaacagggcgggggtggcgcaggcggcagcaacagcagtggcagcggcgcggaagagaactccaacgcggcagccgcggcaatgcagccggtggaggacatgaacgatcatgccattcgcggcgacacctttgccacacgggctgaggagaagcgcgctgaggccgaagcagcggccgaagctgccgcccccgctgcgcaacccgaggtcgagaagcctcagaagaaaccggtgatcaaacccctgacagaggacagcaagaaacgcagttacaacctaataagcaatgacagcaccttcacccagtaccgcagctggtaccttgcatacaactacggcgaccctcagaccggaatccgctcatggaccctgctttgcactcctgacgtaacctgcggctcggagcaggtctactggtcgttgccagacatgatgcaagaccccgtgaccttccgctccacgcgccagatcagcaactttccggtggtgggcgccgagctgttgcccgtgcactccaagagcttctacaacgaccaggccgtctactcccaactcatccgccagtttacctctctgacccacgtgttcaatcgctttcccgagaaccagattttggcgcgcccgccagcccccaccatcaccaccgtcagtgaaaacgttcctgctctcacagatcacgggacgctaccgctgcgcaacagcatcggaggagtccagcgagtgaccattactgacgccagacgccgcacctgcccctacgtttacaaggccctgggcatagtctcgccgcgcgtcctatcgagccgcactttttgagcaagcatgtccatccttatatcgcccagcaataacacaggctggggcctgcgcttcccaagcaagatgtttggcggggccaagaagcgctccgaccaacacccagtgcgcgtgcgcgggcactaccgcgcgccctggggcgcgcacaaacgcggccgcactgggcgcaccaccgtcgatgacgccatcgacgcggtggtggaggaggcgcgcaactacacgcccacgccgccaccagtgtccacagtggacgcggccattcagaccgtggtgcgcggagcccggcgctatgctaaaatgaagagacggcggaggcgcgtagcacgtcgccaccgccgccgacccggcactgccgcccaacgcgcggcggcggccctgcttaaccgcgcacgtcgcaccggccgacgggcggccatgcgggccgctcgaaggctggccgcgggtattgtcactgtgccccccaggtccaggcgacgagcggccgccgcagcagccgcggccattagtgctatgactcagggtcgcaggggcaacgtgtattgggtgcgcgactcggttagcggcctgcgcgtgcccgtgcgcacccgccccccgcgcaactagattgcaagaaaaaactacttagactcgtactgttgtatgtatccagcggcggcggcgcgcaacgaagctatgtccaagcgcaaaatcaaagaagagatgctccaggtcatcgcgccggagatctatggccccccgaagaaggaagagcaggattacaagccccgaaagctaaagcgggtcaaaaagaaaaagaaagatgatgatgatgaacttgacgacgaggtggaactgctgcacgctaccgcgcccaggcgacgggtacagtggaaaggtcgacgcgtaaaacgtgttttgcgacccggcaccaccgtagtctttacgcccggtgagcgctccacccgcacctacaagcgcgtgtatgatgaggtgtacggcgacgaggacctgcttgagcaggccaacgagcgcctcggggagtttgcctacggaaagcggcataaggacatgctggcgttgccgctggacgagggcaacccaacacctagcctaaagcccgtaacactgcagcaggtgctgcccgcgcttgcaccgtccgaagaaaagcgcggcctaaagcgcgagtctggtgacttggcacccaccgtgcagctgatggtacccaagcgccagcgactggaagatgtcttggaaaaaatgaccgtggaacctgggctggagcccgaggtccgcgtgcggccaatcaagcaggtggcgccgggactgggcgtgcagaccgtggacgttcagatacccactaccagtagcaccagtattgccaccgccacagagggcatggagacacaaacgtccccggttgcctcagcggtggcggatgccgcggtgcaggcggtcgctgcggccgcgtccaagacctctacggaggtgcaaacggacccgtggatgtttcgcgtttcagccccccggcgcccgcgcggttcgaggaagtacggcgccgccagcgcgctactgcccgaatatgccctacatccttccattgcgcctacccccggctatcgtggctacacctaccgccccagaagacgagcaactacccgacgccgaaccaccactggaacccgccgccgccgtcgccgtcgccagcccgtgctggccccgatttccgtgcgcagggtggctcgcgaaggaggcaggaccctggtgctgccaacagcgcgctaccaccccagcatcgtttaaaagccggtctttgtggttcttgcagatatggccctcacctgccgcctccgtttcccggtgccgggattccgaggaagaatgcaccgtaggaggggcatggccggccacggcctgacgggcggcatgcgtcgtgcgcaccaccggcggcggcgcgcgtcgcaccgtcgcatgcgcggcggtatcctgcccctccttattccactgatcgccgcggcgattggcgccgtgcccggaattgcatccgtggccttgcaggcgcagagacactgattaaaaacaagttgcatgtggaaaaatcaaaataaaaagtctggactctcacgctcgcttggtcctgtaactattttgtagaatggaagacatcaactttgcgtctctggccccgcgacacggctcgcgcccgttcatgggaaactggcaagatatcggcaccagcaatatgagcggtggcgccttcagctggggctcgctgtggagcggcattaaaaatttcggttccaccgttaagaactatggcagcaaggcctggaacagcagcacaggccagatgctgagggataagttgaaagagcaaaatttccaacaaaaggtggtagatggcctggcctctggcattagcggggtggtggacctggccaaccaggcagtgcaaaataagattaacagtaagcttgatccccgccctcccgtagaggagcctccaccggccgtggagacagtgtctccagaggggcgtggcgaaaagcgtccgcgccccgacagggaagaaactctggtgacgcaaatagacgagcctccctcgtacgaggaggcactaaagcaaggcctgcccaccacccgtcccatcgcgcccatggctaccggagtgctgggccagcacacacccgtaacgctggacctgcctccccccgccgacacccagcagaaacctgtgctgccaggcccgaccgccgttgttgtaacccgtcctagccgcgcgtccctgcgccgcgccgccagcggtccgcgatcgttgcggcccgtagccagtggcaactggcaaagcacactgaacagcatcgtgggtctgggggtgcaatccctgaagcgccgacgatgcttctgaatagctaacgtgtcgtatgtgtgtcatgtatgcgtccatgtcgccgccagaggagctgctgagccgccgcgcgcccgctttccaagatggctaccccttcgatgatgccgcagtggtcttacatgcacatctcgggccaggacgcctcggagtacctgagccccgggctggtgcagtttgcccgcgccaccgagacgtacttcagcctgaataacaagtttagaaaccccacggtggcgcctacgcacgacgtgaccacagaccggtcccagcgtttgacgctgcggttcatccctgtggaccgtgaggatactgcgtactcgtacaaggcgcggttcaccctagctgtgggtgataaccgtgtgctggacatggcttccacgtactttgacatccgcggcgtgctggacaggggccctacttttaagccctactctggcactgcctacaacgccctggctcccaagggtgccccaaatccttgcgaatgggatgaagctgctactgctcttgaaataaacctagaagaagaggacgatgacaacgaagacgaagtagacgagcaagctgagcagcaaaaaactcacgtatttgggcaggcgccttattctggtataaatattacaaaggagggtattcaaataggtgtcgaaggtcaaacacctaaatatgccgataaaacatttcaacctgaacctcaaataggagaatctcagtggtacgaaactgaaattaatcatgcagctgggagagtccttaaaaagactaccccaatgaaaccatgttacggttcatatgcaaaacccacaaatgaaaatggagggcaaggcattcttgtaaagcaacaaaatggaaagctagaaagtcaagtggaaatgcaatttttctcaactactgaggcgaccgcaggcaatggtgataacttgactcctaaagtggtattgtacagtgaagatgtagatatagaaaccccagacactcatatttcttacatgcccactattaaggaaggtaactcacgagaactaatgggccaacaatctatgcccaacaggcctaattacattgcttttagggacaattttattggtctaatgtattacaacagcacgggtaatatgggtgttctggcgggccaagcatcgcagttgaatgctgttgtagatttgcaagacagaaacacagagctttcataccagcttttgcttgattccattggtgatagaaccaggtacttttctatgtggaatcaggctgttgacagctatgatccagatgttagaattattgaaaatcatggaactgaagatgaacttccaaattactgctttccactgggaggtgtgattaatacagagactcttaccaaggtaaaacctaaaacaggtcaggaaaatggatgggaaaaagatgctacagaattttcagataaaaatgaaataagagttggaaataattttgccatggaaatcaatctaaatgccaacctgtggagaaatttcctgtactccaacatagcgctgtatttgcccgacaagctaaagtacagtccttccaacgtaaaaatttctgataacccaaacacctacgactacatgaacaagcgagtggtggctcccgggttagtggactgctacattaaccttggagcacgctggtcccttgactatatggacaacgtcaacccatttaaccaccaccgcaatgctggcctgcgctaccgctcaatgttgctgggcaatggtcgctatgtgcccttccacatccaggtgcctcagaagttctttgccattaaaaacctccttctcctgccgggctcatacacctacgagtggaacttcaggaaggatgttaacatggttctgcagagctccctaggaaatgacctaagggttgacggagccagcattaagtttgatagcatttgcctttacgccaccttcttccccatggcccacaacaccgcctccacgcttgaggccatgcttagaaacgacaccaacgaccagtcctttaacgactatctctccgccgccaacatgctctaccctatacccgccaacgctaccaacgtgcccatatccatcccctcccgcaactgggcggctttccgcggctgggccttcacgcgccttaagactaaggaaaccccatcactgggctcgggctacgacccttattacacctactctggctctataccctacctagatggaaccttttacctcaaccacacctttaagaaggtggccattacctttgactcttctgtcagctggcctggcaatgaccgcctgcttacccccaacgagtttgaaattaagcgctcagttgacggggagggttacaacgttgcccagtgtaacatgaccaaagactggttcctggtacaaatgctagctaactacaacattggctaccagggcttctatatcccagagagctacaaggaccgcatgtactccttctttagaaacttccagcccatgagccgtcaggtggtggatgatactaaatacaaggactaccaacaggtgggcatcctacaccaacacaacaactctggatttgttggctaccttgcccccaccatgcgcgaaggacaggcctaccctgctaacttcccctatccgcttataggcaagaccgcagttgacagcattacccagaaaaagtttctttgcgatcgcaccctttggcgcatcccattctccagtaactttatgtccatgggcgcactcacagacctgggccaaaaccttctctacgccaactccgcccacgcgctagacatgacttttgaggtggatcccatggacgagcccacccttctttatgttttgtttgaagtctttgacgtggtccgtgtgcaccggccgcaccgcggcgtcatcgaaaccgtgtacctgcgcacgcccttctcggccggcaacgccacaacataaagaagcaagcaacatcaacaacagctgccgccatgggctccagtgagcaggaactgaaagccattgtcaaagatcttggttgtgggccatattttttgggcacctatgacaagcgctttccaggctttgtttctccacacaagctcgcctgcgccatagtcaatacggccggtcgcgagactgggggcgtacactggatggcctttgcctggaacccgcactcaaaaacatgctacctctttgagccctttggcttttctgaccagcgactcaagcaggtttaccagtttgagtacgagtcactcctgcgccgtagcgccattgcttcttcccccgaccgctgtataacgctggaaaagtccacccaaagcgtacaggggcccaactcggccgcctgtggactattctgctgcatgtttctccacgcctttgccaactggccccaaactcccatggatcacaaccccaccatgaaccttattaccggggtacccaactccatgctcaacagtccccaggtacagcccaccctgcgtcgcaaccaggaacagctctacagcttcctggagcgccactcgccctacttccgcagccacagtgcgcagattaggagcgccacttctttttgtcacttgaaaaacatgtaaaaataatgtactagagacactttcaataaaggcaaatgcttttatttgtacactctcgggtgattatttacccccacccttgccgtctgcgccgtttaaaaatcaaaggggttctgccgcgcatcgctatgcgccactggcagggacacgttgcgatactggtgtttagtgctccacttaaactcaggcacaaccatccgcggcagctcggtgaagttttcactccacaggctgcgcaccatcaccaacgcgtttagcaggtcgggcgccgatatcttgaagtcgcagttggggcctccgccctgcgcgcgcgagttgcgatacacagggttgcagcactggaacactatcagcgccgggtggtgcacgctggccagcacgctcttgtcggagatcagatccgcgtccaggtcctccgcgttgctcagggcgaacggagtcaactttggtagctgccttcccaaaaagggcgcgtgcccaggctttgagttgcactcgcaccgtagtggcatcaaaaggtgaccgtgcccggtctgggcgttaggatacagcgcctgcataaaagccttgatctgcttaaaagccacctgagcctttgcgccttcagagaagaacatgccgcaagacttgccggaaaactgattggccggacaggccgcgtcgtgcacgcagcaccttgcgtcggtgttggagatctgcaccacatttcggccccaccggttcttcacgatcttggccttgctagactgctccttcagcgcgcgctgcccgttttcgctcgtcacatccatttcaatcacgtgctccttatttatcataatgcttccgtgtagacacttaagctcgccttcgatctcagcgcagcggtgcagccacaacgcgcagcccgtgggctcgtgatgcttgtaggtcacctctgcaaacgactgcaggtacgcctgcaggaatcgccccatcatcgtcacaaaggtcttgttgctggtgaaggtcagctgcaacccgcggtgctcctcgttcagccaggtcttgcatacggccgccagagcttccacttggtcaggcagtagtttgaagttcgcctttagatcgttatccacgtggtacttgtccatcagcgcgcgcgcagcctccatgcccttctcccacgcagacacgatcggcacactcagcgggttcatcaccgtaatttcactttccgcttcgctgggctcttcctcttcctcttgcgtccgcataccacgcgccactgggtcgtcttcattcagccgccgcactgtgcgcttacctcctttgccatgcttgattagcaccggtgggttgctgaaacccaccatttgtagcgccacatcttctctttcttcctcgctgtccacgattacctctggtgatggcgggcgctcgggcttgggagaagggcgcttctttttcttcttgggcgcaatggccaaatccgccgccgaggtcgatggccgcgggctgggtgtgcgcggcaccagcgcgtcttgtgatgagtcttcctcgtcctcggactcgatacgccgcctcatccgcttttttgggggcgcccggggaggcggcggcgacggggacggggacgacacgtcctccatggttgggggacgtcgcgccgcaccgcgtccgcgctcgggggtggtttcgcgctgctcctcttcccgactggccatttccttctcctataggcagaaaaagatcatggagtcagtcgagaagaaggacagcctaaccgccccctctgagttcgccaccaccgcctccaccgatgccgccaacgcgcctaccaccttccccgtcgaggcacccccgcttgaggaggaggaagtgattatcgagcaggacccaggttttgtaagcgaagacgacgaggaccgctcagtaccaacagaggataaaaagcaagaccaggacaacgcagaggcaaacgaggaacaagtcgggcggggggacgaaaggcatggcgactacctagatgtgggagacgacgtgctgttgaagcatctgcagcgccagtgcgccattatctgcgacgcgttgcaagagcgcagcgatgtgcccctcgccatagcggatgtcagccttgcctacgaacgccacctattctcaccgcgcgtaccccccaaacgccaagaaaacggcacatgcgagcccaacccgcgcctcaacttctaccccgtatttgccgtgccagaggtgcttgccacctatcacatctttttccaaaactgcaagatacccctatcctgccgtgccaaccgcagccgagcggacaagcagctggccttgcggcagggcgctgtcatacctgatatcgcctcgctcaacgaagtgccaaaaatctttgagggtcttggacgcgacgagaagcgcgcggcaaacgctctgcaacaggaaaacagcgaaaatgaaagtcactctggagtgttggtggaactcgagggtgacaacgcgcgcctagccgtactaaaacgcagcatcgaggtcacccactttgcctacccggcacttaacctaccccccaaggtcatgagcacagtcatgagtgagctgatcgtgcgccgtgcgcagcccctggagagggatgcaaatttgcaagaacaaacagaggagggcctacccgcagttggcgacgagcagctagcgcgctggcttcaaacgcgcgagcctgccgacttggaggagcgacgcaaactaatgatggccgcagtgctcgttaccgtggagcttgagtgcatgcagcggttctttgctgacccggagatgcagcgcaagctagaggaaacattgcactacacctttcgacagggctacgtacgccaggcctgcaagatctccaacgtggagctctgcaacctggtctcctaccttggaattttgcacgaaaaccgccttgggcaaaacgtgcttcattccacgctcaagggcgaggcgcgccgcgactacgtccgcgactgcgtttacttatttctatgctacacctggcagacggccatgggcgtttggcagcagtgcttggaggagtgcaacctcaaggagctgcagaaactgctaaagcaaaacttgaaggacctatggacggccttcaacgagcgctccgtggccgcgcacctggcggacatcattttccccgaacgcctgcttaaaaccctgcaacagggtctgccagacttcaccagtcaaagcatgttgcagaactttaggaactttatcctagagcgctcaggaatcttgcccgccacctgctgtgcacttcctagcgactttgtgcccattaagtaccgcgaatgccctccgccgctttggggccactgctaccttctgcagctagccaactaccttgcctaccactctgacataatggaagacgtgagcggtgacggtctactggagtgtcactgtcgctgcaacctatgcaccccgcaccgctccctggtttgcaattcgcagctgcttaacgaaagtcaaattatcggtacctttgagctgcagggtccctcgcctgacgaaaagtccgcggctccggggttgaaactcactccggggctgtggacgtcggcttaccttcgcaaatttgtacctgaggactaccacgcccacgagattaggttctacgaagaccaatcccgcccgccaaatgcggagcttaccgcctgcgtcattacccagggccacattcttggccaattgcaagccatcaacaaagcccgccaagagtttctgctacgaaagggacggggggtttacttggacccccagtccggcgaggagctcaacccaatccccccgccgccgcagccctatcagcagcagccgcgggcccttgcttcccaggatggcacccaaaaagaagctgcagctgccgccgccacccacggacgaggaggaatactgggacagtcaggcagaggaggttttggacgaggaggaggaggacatgatggaagactgggagagcctagacgaggaagcttccgaggtcgaagaggtgtcagacgaaacaccgtcaccctcggtcgcattcccctcgccggcgccccagaaatcggcaaccggttccagcatggctacaacctccgctcctcaggcgccgccggcactgcccgttcgccgacccaaccgtagatgggacaccactggaaccagggccggtaagtccaagcagccgccgccgttagcccaagagcaacaacagcgccaaggctaccgctcatggcgcgggcacaagaacgccatagttgcttgcttgcaagactgtgggggcaacatctccttcgcccgccgctttcttctctaccatcacggcgtggccttcccccgtaacatcctgcattactaccgtcatctctacagcccatactgcaccggcggcagcggcagcggcagcaacagcagcggccacacagaagcaaaggcgaccggatagcaagactctgacaaagcccaagaaatccacagcggcggcagcagcaggaggaggagcgctgcgtctggcgcccaacgaacccgtatcgacccgcgagcttagaaacaggatttttcccactctgtatgctatatttcaacagagcaggggccaagaacaagagctgaaaataaaaaacaggtctctgcgatccctcacccgcagctgcctgtatcacaaaagcgaagatcagcttcggcgcacgctggaagacgcggaggctctcttcagtaaatactgcgcgctgactcttaaggactagtttcgcgccctttctcaaatttaagcgcgaaaactacgtcatctccagcggccacacccggcgccagcacctgtcgtcagcgccattatgagcaaggaaattcccacgccctacatgtggagttaccagccacaaatgggacttgcggctggagctgcccaagactactcaacccgaataaactacatgagcgcgggaccccacatgatatcccgggtcaacggaatccgcgcccaccgaaaccgaattctcttggaacaggcggctattaccaccacacctcgtaataaccttaatccccgtagttggcccgctgccctggtgtaccaggaaagtcccgctcccaccactgtggtacttcccagagacgcccaggccgaagttcagatgactaactcaggggcgcagcttgcgggcggctttcgtcacagggtgcggtcgcccgggcagggtataactcacctgacaatcagagggcgaggtattcagctcaacgacgagtcggtgagctcctcgcttggtctccgtccggacgggacatttcagatcggcggcgccggccgtccttcattcacgcctcgtcaggcaatcctaactctgcagacctcgtcctctgagccgcgctctggaggcattggaactctgcaatttattgaggagtttgtgccatcggtctactttaaccccttctcgggacctcccggccactatccggatcaatttattcctaactttgacgcggtaaaggactcggcggacggctacgactgaatgttaagtggagaggcagagcaactgcgcctgaaacacctggtccactgtcgccgccacaagtgctttgcccgcgactccggtgagttttgctactttgaattgcccgaggatcatatcgagggcccggcgcacggcgtccggcttaccgcccagggagagcttgcccgtagcctgattcgggagtttacccagcgccccctgctagttgagcgggacaggggaccctgtgttctcactgtgatttgcaactgtcctaaccttggattacatcaagatctttgttgccatctctgtgctgagtataataaatacagaaattaaaatatactggggctcctatcgccatcctgtaaacgccaccgtcttcacccgcccaagcaaaccaaggcgaaccttacctggtacttttaacatctctccctctgtgatttacaacagtttcaacccagacggagtgagtctacgagagaacctctccgagctcagctactccatcagaaaaaacaccaccctccttacctgccgggaacgtacgagtgcgtcaccggccgctgcaccacacctaccgcctgaccgtaaaccagactttttccggacagacctcaataactctgtttaccagaacaggaggtgagcttagaaaacccttagggtattaggccaaaggcgcagctactgtggggtttatgaacaattcaagcaactctacgggctattctaattcaggtttctctagaatcggggttggggttattctctgtcttgtgattctctttattcttatactaacgcttctctgcctaaggctcgccgcctgctgtgtgcacatttgcatttattgtcagctttttaaacgctggggtcgccacccaagatgattaggtacataatcctaggtttactcacccttgcgtcagcccacggtaccacccaaaaggtggattttaaggagccagcctgtaatgttacattcgcagctgaagctaatgagtgcaccactcttataaaatgcaccacagaacatgaaaagctgcttattcgccacaaaaacaaaattggcaagtatgctgtttatgctatttggcagccaggtgacactacagagtataatgttacagttttccagggtaaaagtcataaaacttttatgtatacttttccattttatgaaatgtgcgacattaccatgtacatgagcaaacagtataagttgtggcccccacaaaattgtgtggaaaacactggcactttctgctgcactgctatgctaattacagtgctcgctttggtctgtaccctactctatattaaatacaaaagcagacgcagctttattgaggaaaagaaaatgccttaatttactaagttacaaagctaatgtcaccactaactgctttactcgctgcttgcaaaacaaattcaaaaagttagcattataattagaataggatttaaaccccccggtcatttcctgctcaataccattcccctgaacaattgactctatgtgggatatgctccagcgctacaaccttgaagtcaggcttcctggatgtcagcatctgactttggccagcacctgtcccgcggatttgttccagtccaactacagcgacccaccctaacagagatgaccaacacaaccaacgcggccgccgctaccggacttacatctaccacaaatacaccccaagtttctgcctttgtcaataactgggataacttgggcatgtggtggttctccatagcgcttatgtttgtatgccttattattatgtggctcatctgctgcctaaagcgcaaacgcgcccgaccacccatctatagtcccatcattgtgctacacccaaacaatgatggaatccatagattggacggactgaaacacatgttcttttctcttacagtatgattaaatgagacatgattcctcgagtttttatattactgacccttgttgcgcttttttgtgcgtgctccacattggctgcggtttctcacatcgaagtagactgcattccagccttcacagtctatttgctttacggatttgtcaccctcacgctcatctgcagcctcatcactgtggtcatcgcctttatccagtgcattgactgggtctgtgtgcgctttgcatatctcagacaccatccccagtacagggacaggactatagctgagcttcttagaattctttaattatgaaatttactgtgacttttctgctgattatttgcaccctatctgcgttttgttccccgacctccaagcctcaaagacatatatcatgcagattcactcgtatatggaatattccaagttgctacaatgaaaaaagcgatctttccgaagcctggttatatgcaatcatctctgttatggtgttctgcagtaccatcttagccctagctatatatccctaccttgacattggctggaaacgaatagatgccatgaaccacccaactttccccgcgcccgctatgcttccactgcaacaagttgttgccggcggctttgtcccagccaatcagcctcgccccacttctcccacccccactgaaatcagctactttaatctaacaggaggagatgactgacaccctagatctagaaatggacggaattattacagagcagcgcctgctagaaagacgcagggcagcggccgagcaacagcgcatgaatcaagagctccaagacatggttaacttgcaccagtgcaaaaggggtatcttttgtctggtaaagcaggccaaagtcacctacgacagtaataccaccggacaccgccttagctacaagttgccaaccaagcgtcagaaattggtggtcatggtgggagaaaagcccattaccataactcagcactcggtagaaaccgaaggctgcattcactcaccttgtcaaggacctgaggatctctgcacccttattaagaccctgtgcggtctcaaagatcttattccctttaactaataaaaaaaaataataaagcatcacttacttaaaatcagttagcaaatttctgtccagtttattcagcagcacctccttgccctcctcccagctctggtattgcagcttcctcctggctgcaaactttctccacaatctaaatggaatgtcagtttcctcctgttcctgtccatccgcacccactatcttcatgttgttgcagatgaagcgcgcaagaccgtctgaagataccttcaaccccgtgtatccatatgacacggaaaccggtcctccaactgtgccttttcttactcctccctttgtatcccccaatgggtttcaagagagtccccctggggtactctctttgcgcctatccgaacctctagttacctccaatggcatgcttgcgctcaaaatgggcaacggcctctctctggacgaggccggcaaccttacctcccaaaatgtaaccactgtgagcccacctctcaaaaaaaccaagtcaaacataaacctggaaatatctgcacccctcacagttacctcagaagccctaactgtggctgccgccgcacctctaatggtcgcgggcaacacactcaccatgcaatcacaggccccgctaaccgtgcacgactccaaacttagcattgccacccaaggacccctcacagtgtcagaaggaaagctagccctgcaaacatcaggccccctcaccaccaccgatagcagtacccttactatcactgcctcaccccctctaactactgccactggtagcttgggcattgacttgaaagagcccatttatacacaaaatggaaaactaggactaaagtacggggctcctttgcatgtaacagacgacctaaacactttgaccgtagcaactggtccaggtgtgactattaataatacttccttgcaaactaaagttactggagccttgggttttgattcacaaggcaatatgcaacttaatgtagcaggaggactaaggattgattctcaaaacagacgccttatacttgatgttagttatccgtttgatgctcaaaaccaactaaatctaagactaggacagggccctctttttataaactcagcccacaacttggatattaactacaacaaaggcctttacttgtttacagcttcaaacaattccaaaaagcttgaggttaacctaagcactgccaaggggttgatgtttgacgctacagccatagccattaatgcaggagatgggcttgaatttggttcacctaatgcaccaaacacaaatcccctcaaaacaaaaattggccatggcctagaatttgattcaaacaaggctatggttcctaaactaggaactggccttagttttgacagcacaggtgccattacagtaggaaacaaaaataatgataagctaactttgtggaccacaccagctccatctcctaactgtagactaaatgcagagaaagatgctaaactcactttggtcttaacaaaatgtggcagtcaaatacttgctacagtttcagttttggctgttaaaggcagtttggctccaatatctggaacagttcaaagtgctcatcttattataagatttgacgaaaatggagtgctactaaacaattccttcctggacccagaatattggaactttagaaatggagatcttactgaaggcacagcctatacaaacgctgttggatttatgcctaacctatcagcttatccaaaatctcacggtaaaactgccaaaagtaacattgtcagtcaagtttacttaaacggagacaaaactaaacctgtaacactaaccattacactaaacggtacacaggaaacaggagacacaactccaagtgcatactctatgtcattttcatgggactggtctggccacaactacattaatgaaatatttgccacatcctcttacactttttcatacattgcccaagaataaagaatcgtttgtgttatgtttcaacgtgtttatttttcaattgcagaaaatttcaagtcatttttcattcagtagtatagccccaccaccacatagcttatacagatcaccgtaccttaatcaaactcacagaaccctagtattcaacctgccacctccctcccaacacacagagtacacagtcctttctccccggctggccttaaaaagcatcatatcatgggtaacagacatattcttaggtgttatattccacacggtttcctgtcgagccaaacgctcatcagtgatattaataaactccccgggcagctcacttaagttcatgtcgctgtccagctgctgagccacaggctgctgtccaacttgcggttgcttaacgggcggcgaaggagaagtccacgcctacatgggggtagagtcataatcgtgcatcaggatagggcggtggtgctgcagcagcgcgcgaataaactgctgccgccgccgctccgtcctgcaggaatacaacatggcagtggtctcctcagcgatgattcgcaccgcccgcagcataaggcgccttgtcctccgggcacagcagcgcaccctgatctcacttaaatcagcacagtaactgcagcacagcaccacaatattgttcaaaatcccacagtgcaaggcgctgtatccaaagctcatggcggggaccacagaacccacgtggccatcataccacaagcgcaggtagattaagtggcgacccctcataaacacgctggacataaacattacctcttttggcatgttgtaattcaccacctcccggtaccatataaacctctgattaaacatggcgccatccaccaccatcctaaaccagctggccaaaacctgcccgccggctatacactgcagggaaccgggactggaacaatgacagtggagagcccaggactcgtaaccatggatcatcatgctcgtcatgatatcaatgttggcacaacacaggcacacgtgcatacacttcctcaggattacaagctcctcccgcgttagaaccatatcccagggaacaacccattcctgaatcagcgtaaatcccacactgcagggaagacctcgcacgtaactcacgttgtgcattgtcaaagtgttacattcgggcagcagcggatgatcctccagtatggtagcgcgggtttctgtctcaaaaggaggtagacgatccctactgtacggagtgcgccgagacaaccgagatcgtgttggtcgtagtgtcatgccaaatggaacgccggacgtagtcatatttcctgaagcaaaaccaggtgcgggcgtgacaaacagatctgcgtctccggtctcgccgcttagatcgctctgtgtagtagttgtagtatatccactctctcaaagcatccaggcgccccctggcttcgggttctatgtaaactccttcatgcgccgctgccctgataacatccaccaccgcagaataagccacacccagccaacctacacattcgttctgcgagtcacacacgggaggagcgggaagagctggaagaaccatgtttttttttttattccaaaagattatccaaaacctcaaaatgaagatctattaagtgaacgcgctcccctccggtggcgtggtcaaactctacagccaaagaacagataatggcatttgtaagatgttgcacaatggcttccaaaaggcaaacggccctcacgtccaagtggacgtaaaggctaaacccttcagggtgaatctcctctataaacattccagcaccttcaaccatgcccaaataattctcatctcgccaccttctcaatatatctctaagcaaatcccgaatattaagtccggccattgtaaaaatctgctccagagcgccctccaccttcagcctcaagcagcgaatcatgattgcaaaaattcaggttcctcacagacctgtataagattcaaaagcggaacattaacaaaaataccgcgatcccgtaggtcccttcgcagggccagctgaacataatcgtgcaggtctgcacggaccagcgcggccacttccccgccaggaaccatgacaaaagaacccacactgattatgacacgcatactcggagctatgctaaccagcgtagccccgatgtaagcttgttgcatgggcggcgatataaaatgcaaggtgctgctcaaaaaatcaggcaaagcctcgcgcaaaaaagaaagcacatcgtagtcatgctcatgcagataaaggcaggtaagctccggaaccaccacagaaaaagacaccatttttctctcaaacatgtctgcgggtttctgcataaacacaaaataaaataacaaaaaaacatttaaacattagaagcctgtcttacaacaggaaaaacaacccttataagcataagacggactacggccatgccggcgtgaccgtaaaaaaactggtcaccgtgattaaaaagcaccaccgacagctcctcggtcatgtccggagtcataatgtaagactcggtaaacacatcaggttgattcacatcggtcagtgctaaaaagcgaccgaaatagcccgggggaatacatacccgcaggcgtagagacaacattacagcccccataggaggtataacaaaattaataggagagaaaaacacataaacacctgaaaaaccctcctgcctaggcaaaatagcaccctcccgctccagaacaacatacagcgcttccacagcggcagccataacagtcagccttaccagtaaaaaagaaaacctattaaaaaaacaccactcgacacggcaccagctcaatcagtcacagtgtaaaaaagggccaagtgcagagcgagtatatataggactaaaaaatgacgtaacggttaaagtccacaaaaaacacccagaaaaccgcacgcgaacctacgcccagaaacgaaagccaaaaaacccacaacttcctcaaatcgtcacttccgttttcccacgttacgtaacttcccattttaagaaaactacaattcccaacacatacaagttactccgccctaaaacctacgtcacccgccccgttcccacgccccgcgccacgtcacaaactccaccccctcattatcatattggcttcaatccaaaataaggtatattattgatgatg

SEQ ID NO: 209 - DNA, 34794 bp, Human adenovirus 35
catcatcaataatataccttatagatggaatggtgccaatatgtaaatgaggtgattttaaaaagtgtgggccgtgtggtgattggctgtggggttaacggttaaaaggggcggcgcggccgtgggaaaatgacgttttatgggggtggagtttttttgcaagttgtcgcgggaaatgttacgcataaaaaggcttcttttctcacggaactacttagttttcccacggtatttaacaggaaatgaggtagttttgaccggatgcaagtgaaaattgctgattttcgcgcgaaaactgaatgaggaagtgtttttctgaataatgtggtatttatggcagggtggagtatttgttcagggccaggtagactttgacccattacgtggaggtttcgattaccgtgttttttacctgaatttccgcgtaccgtgtcaaagtcttctgtttttacgtaggtgtcagctgatcgctagggtatttatacctcagggtttgtgtcaagaggccactcttgagtgccagcgagaagagttttctcctctgcgccggcagtttaataataaaaaaatgagagatttgcgatttctgcctcaggaaataatctctgctgagactggaaatgaaatattggagcttgtggtgcacgccctgatgggagacgatccggagccacctgtgcagctttttgagcctcctacgcttcaggaactgtatgatttagaggtagagggatcggaggattctaatgaggaagctgtgaatggcttttttaccgattctatgcttttagctgctaatgaaggattagaattagatccgcctttggacactttcaatactccaggggtgattgtggaaagcggtacaggtgtaagaaaattacctgatttgagttccgtggactgtgatttgcactgctatgaagacgggtttcctccgagtgatgaggaggaccatgaaaaggagcagtccatgcagactgcagcgggtgagggagtgaaggctgccaatgttggttttcagttggattgcccggagcttcctggacatggctgtaagtcttgtgaatttcacaggaaaaatactggagtaaaggaactgttatgttcgctttgttatatgagaacgcactgccactttatttacagtaagtgtgtttaagttaaaatttaaaggaatatgctgtttttcacatgtatattgagtgtgagttttgtgcttcttattataggtcctgtgtctgatgctgatgaatcaccatctcctgattctactacctcacctcctgatattcaagcacctgttcctgtggacgtgcgcaagcccattcctgtgaagcttaagcctgggaaacgtccagcagtggagaaacttgaggacttgttacagggtggggacggacctttggacttgagtacacggaaacgtccaagacaataagtgttccatatccgtgtttacttaaggtgacgtcaatatttgtgtgagagtgcaatgtaataaaaatatgttaactgttcactggtttttattgctttttgggcggggactcaggtatataagtagaagcagacctgtgtggttagctcataggagctggctttcatccatggaggtttgggccattttggaagaccttaggaagactaggcaactgttagagagcgcttcggacggagtctccggtttttggagattctggttcgctagtgaattagctagggtagtttttaggataaaacaggactataaacaagaatttgaaaagttgttggtagattgcccaggactttttgaagctcttaatttgggccatcaggttcactttaaagaaaaagttttatcagttttagacttttcaaccccaggtagaactgctgctgctgtggcttttcttacttttatattagataaatggatcccgcagactcatttcagcaggggatacgttttggatttcatagccacagcattgtggagaacatggaaggttcgcaagatgaggacaatcttaggttactggccagtgcagcctttgggtgtagcgggaatcctgaggcatccaccggtcatgccagcggttctggaggaggaacagcaagaggacaacccgagagccggcctggaccctccagtggaggaggcggagtagctgacttgtctcctgaactgcaacgggtgcttactggatctacgtccactggacgggataggggcgttaagagggagagggcatccagtggtactgatgctagatctgagttggctttaagtttaatgagtcgcagacgtcctgaaaccatttggtggcatgaggttcagaaagagggaagggatgaagtttctgtattgcaggagaaatattcactggaacaggtgaaaacatgttggttggagccagaggatgattgggaggtggccattaaaaattatgccaagatagctttgaggcctgataaacagtataagatcagtagacggattaatatccggaatgcttgttacatatctggaaatggggctgaggtggtaatagatactcaagacaagacagttattagatgctgcatgatggatatgtggcctggagtagtcggtatggaagcagtcacttttgtaaatgttaagtttaggggagatggttataatggaatagtgtttatggccaataccaaacttatattgcatggttgtagcttttttggtttcaacaatacctgtgtagatgcctggggacaggttagtgtacgggggtgtagtttctatgcgtgttggattgccacagctggcagaaccaagagtcaattgtctctgaagaaatgcatattccaaagatgtaacctgggcattctgaatgaaggcgaagcaagggtccgtcactgcgcttctacagatactggatgttttattttaattaagggaaatgccagcgtaaagcataacatgatttgtggtgcttccgatgagaggccttatcaaatgctcacttgtgctggtgggcattgtaatatgctggctactgtgcatattgtttcccatcaacgcaaaaaatggcctgtttttgatcacaatgtgttgaccaagtgcaccatgcatgcaggtgggcgtagaggaatgtttatgccttaccagtgtaacatgaatcatgtgaaagtgttgttggaaccagatgccttttccagaatgagcctaacaggaatctttgacatgaacacgcaaatctggaagatcctgaggtatgatgatacgagatcgagggtgcgcgcatgcgaatgcggaggcaagcatgccaggttccagccggtgtgtgtagatgtgaccgaagatctcagaccggatcatttggttattgcccgcactggagcagagttcggatccagtggagaagaaactgactaaggtgagtattgggaaaactttggggtgggattttcagatggacagattgagtaaaaatttgttttttctgtcttgcagctgacatgagtggaaatgcttcttttaaggggggagtcttcagcccttatctgacagggcgtctcccatcctgggcaggagttcgtcagaatgttatgggatctactgtggatggaagacccgttcaacccgccaattcttcaacgctgacctatgctactttaagttcttcacctttggacgcagctgcagccgctgccgccgcctctgtcgccgctaacactgtgcttggaatgggttactatggaagcatcgtggctaattccacttcctctaataacccttctacactgactcaggacaagttacttgtccttttggcccagctggaggctttgacccaacgtctgggtgaactttctcagcaggtggccgagttgcgagtacaaactgagtctgctgtcggcacggcaaagtctaaataaaaaaaattccagaatcaatgaataaataaacgagcttgttgttgatttaaaatcaagtgtttttatttcatttttcgcgcacggtatgccctggaccaccgatctcgatcattgagaactcggtggattttttccagaatcctatagaggtgggattgaatgtttagatacatgggcattaggccgtctttggggtggagatagctccattgaagggattcatgctccggggtagtgttgtaaatcacccagtcataacaaggtcgcagtgcatggtgttgcacaatatcttttagaagtaggctgattgccacagataagcccttggtgtaggtgtttacaaaccggttgagctgggaggggtgcattcgaggtgaaattatgtgcattttggattggatttttaagttggcaatattgccgccaagatcccgtcttgggttcatgttatgaaggactaccaagacggtgtatccggtacatttaggaaatttatcgtgcagcttggatggaaaagcgtggaaaaatttggagacacccttgtgtcctccgagattttccatgcactcatccatgataatagcaatggggccgtgggcagcggcgcgggcaaacacgttccgtgggtctgacacatcatagttatgttcctgagttaaatcatcataagccattttaatgaatttggggcggagcgtaccagattggggtatgaatgttccttcgggccccggagcatagttcccctcacagatttgcatttcccaagctttcagttctgagggtggaatcatgtccacctggggggctatgaagaacaccgtttcgggggcgggggtgattagttgggatgatagcaagtttctgagcaattgagatttgccacatccggtggggccataaataattccgattacaggttgcaggtggtagtttagggaacggcaactgccgtcttctcgaagcaagggggccacctcgttcatcatttcccttacatgcatattttcccgcaccaaatccattaggaggcgctctcctcctagtgatagaagttcttgtagtgaggaaaagtttttcagcggttttagaccgtcagccatgggcattttggaaagagtttgctgcaaaagttctagtctgttccacagttcagtgatgtgttctatggcatctcgatccagcagacctcctcgtttcgcgggtttggacggctcctggagtagggtatgagacgatgggcgtccagcgctgccagggttcggtccttccagggtctcagtgttcgagtcagggttgtttccgtcacagtgaaggggtgtgcgcctgcttgggcgcttgccagggtgcgcttcagactcattctgctggtggagaacttctgtcgcttggcgccctgtatgtcggccaagtagcagtttaccatgagttcgtagttgagcgcctcggctgcgtggcctttggcgcggagcttacctttggaagttttcttgcataccgggcagtataggcatttcagcgcatacagcttgggcgcaaggaaaatggattctggggagtatgcatccgcgccgcaggaggcgcaaacagtttcacattccaccagccaggttaaatccggttcattggggtcaaaaacaagttttccgccatattttttgatgcgtttcttacctttggtctccataagttcgtgtcctcgttgagtgacaaacaggctgtccgtatctccgtagactgattttacaggcctcttctccagtggagtgcctcggtcttcttcgtacaggaactctgaccactctgatacaaaggcgcgcgtccaggccagcacaaaggaggctatgtgggaggggtagcgatcgttgtcaaccagggggtccaccttttccaaagtatgcaaacacatgtcaccctcttcaacatccaggaatgtgattggcttgtaggtgtatttcacgtgacctggggtccccgctgggggggtataaaagggggcggttctttgctcttcctcactgtcttccggatcgctgtccaggaacgtcagctgttggggtaggtattccctctcgaaggcgggcatgacctctgcactcaggttgtcagtttctaagaacgaggaggatttgatattgacagtgccggttgagatgcctttcatgaggttttcgtccatttggtcagaaaacacaatttttttattgtcaagtttggtggcaaatgatccatacagggcgttggataaaagtttggcaatggatcgcatggtttggttcttttccttgtccgcgcgctctttggcggcgatgttgagttggacatactcgcgtgccaggcacttccattcggggaagatagttgttaattcatctggcacgattctcacttgccaccctcgattatgcaaggtaattaaatccacactggtggccacctcgcctcgaaggggttcattggtccaacagagcctacctcctttcctagaacagaaagggggaagtgggtctagcataagttcatcgggagggtctgcatccatggtaaagattcccggaagtaaatccttatcaaaatagctgatgggagtggggtcatctaaggccatttgccattctcgagctgccagtgcgcgctcatatgggttaaggggactgccccagggcatgggatgggtgagagcagaggcatacatgccacagatgtcatagacgtagatgggatcctcaaagatgcctatgtaggttggatagcatcgcccccctctgatacttgctcgcacatagtcatatagttcatgtgatggcgctagcagccccggacccaagttggtgcgattgggtttttctgttctgtagacgatctggcgaaagatggcgtgagaattggaagagatggtgggtctttgaaaaatgttgaaatgggcatgaggtagacctacagagtctctgacaaagtgggcataagattcttgaagcttggttaccagttcggcggtgacaagtacgtctagggcgcagtagtcaagtgtttcttgaatgatgtcataacctggttggtttttcttttcccacagttcgcggttgagaaggtattcttcgcgatccttccagtactcttctagcggaaacccgtctttgtctgcacggtaagatcctagcatgtagaactgattaactgccttgtaagggcagcagcccttctctacgggtagagagtatgcttgagcagcttttcgtagcgaagcgtgagtaagggcaaaggtgtctctgaccatgactttgagaaattggtatttgaagtccatgtcgtcacaggctccctgttcccagagttggaagtctacccgtttcttgtaggcggggttgggcaaagcgaaagtaacatcattgaagagaatcttaccggctctgggcataaaattgcgagtgatgcggaaaggctgtggtacttccgctcgattgttgatcacctgggcagctaggacgatttcgtcgaaaccgttgatgttgtgtcctacgatgtataattctatgaaacgcggcgtgcctctgacgtgaggtagcttactgagctcatcaaaggttaggtctgtggggtcagataaggcgtagtgttcgagagcccattcgtgcaggtgaggatttgcatgtaggaatgatgaccaaagatctaccgccagtgctgtttgtaactggtcccgatactgacgaaaatgccggccaattgccattttttctggagtgacacagtagaaggttctggggtcttgttgccatcgatcccacttgagtttaatggctagatcgtgggccatgttgacgagacgctcttctcctgagagtttcatgaccagcatgaaaggaactagttgtttgccaaaggatcccatccaggtgtaagtttccacatcgtaggtcaggaagagtctttctgtgcgaggatgagagccgatcgggaagaactggatttcctgccaccagttggaggattggctgttgatgtgatggaagtagaagtttctgcggcgcgccgagcattcgtgtttgtgcttgtacagacggccgcagtagtcgcagcgttgcacgggttgtatctcgtgaatgagctgtacctggcttcccttgacgagaaatttcagtgggaagccgaggcctggcgattgtatctcgtgctcttctatattcgctgtatcggcctgttcatcttctgtttcgatggtggtcatgctgacgagcccccgcgggaggcaagtccagacctcggcgcgggaggggcggagctgaaggacgagagcgcgcaggctggagctgtccagagtcctgagacgctgcggactcaggttagtaggtagggacagaagattaacttgcatgatcttttccagggcgtgcgggaggttcagatggtacttgatttccacaggttcgtttgtagagacgtcaatggcttgcagggttccgtgtcctttgggcgccactaccgtacctttgttttttcttttgatcggtggtggctctcttgcttcttgcatgctcagaagcggtgacggggacgcgcgccgggcggcagcggttgttccggacccgggggcatggctggtagtggcacgtcggcgccgcgcacgggcaggttctggtattgcgctctgagaagacttgcgtgcgccaccacgcgtcgattgacgtcttgtatctgacgtctctgggtgaaagctaccggccccgtgagcttgaacctgaaagagagttcaacagaatcaatttcggtatcgttaacggcagcttgtctcagtatttcttgtacgtcaccagagttgtcctggtaggcgatctccgccatgaactgctcgatttcttcctcctgaagatctccgcgacccgctctttcgacggtggccgcgaggtcattggagatacggcccatgagttgggagaatgcattcatgcccgcctcgttccagacgcggctgtaaaccacggccccctcggagtctcttgcgcgcatcaccacctgagcgaggttaagctccacgtgtctggttaagaccgcatagttgcataggcgctgaaaaaggtagttgagtgtggtggcaatgtgttcggcgacgaagaaatacatgatccatcgtctcagcggcatttcgctaacatcgcccagagcttccaagcgctccatggcctcgtagaagtccacggcaaaattaaaaaactgggagtttcgcgcggacacggtcaattcctcctcgagaagacggatgagttcggctatggtggcccgtacttcgcgttcgaaggctcccgggatctcttcttcctcttctatctcttcttccactaacatctcttcttcgtcttcaggcgggggcggagggggcacgcggcgacgtcgacggcgcacgggcaaacggtcgatgaatcgttcaatgacctctccgcggcggcggcgcatggtttcagtgacggcgcggccgttctcgcgcggtcgcagagtaaaaacaccgccgcgcatctccttaaagtggtgactgggaggttctccgtttgggagggagagggcgctgattatacattttattaattggcccgtagggactgcgcgcagagatctgatcgtgtcaagatccacgggatctgaaaacctttcgacgaaagcgtctaaccagtcacagtcacaaggtaggctgagtacggcttcttgtgggcgggggtggttatgtgttcggtctgggtcttctgtttcttcttcatctcgggaaggtgagacgatgctgctggtgatgaaattaaagtaggcagttctaagacggcggatggtggcgaggagcaccaggtctttgggtccggcttgctggatacgcaggcgattggccattccccaagcattatcctgacatctagcaagatctttgtagtagtcttgcatgagccgttctacgggcacttcttcctcacccgttctgccatgcatacgtgtgagtccaaatccgcgcattggttgtaccagtgccaagtcagctacgactctttcggcgaggatggcttgctgtacttgggtaagggtggcttgaaagtcatcaaaatccacaaagcggtggtaagcccctgtattaatggtgtaagcacagttggccatgactgaccagttaactgtctggtgaccagggcgcacgagctcggtgtatttaaggcgcgaataggcgcgggtgtcaaagatgtaatcgttgcaggtgcgcaccagatactggtaccctataagaaaatgcggcggtggttggcggtagagaggccatcgttctgtagctggagcgccaggggcgaggtcttccaacataaggcggtgatagccgtagatgtacctggacatccaggtgattcctgcggcggtagtagaagcccgaggaaactcgcgtacgcggttccaaatgttgcgtagcggcatgaagtagttcattgtaggcacggtttgaccagtgaggcgcgcgcagtcattgatgctctatagacacggagaaaatgaaagcgttcagcgactcgactccgtagcctggaggaacgtgaacgggttgggtcgcggtgtaccccggttcgagacttgtactcgagccggccggagccgcggctaacgtggtattggcactcccgtctcgacccagcctacaaaaatccaggatacggaatcgagtcgttttgctggtttccgaatggcagggaagtgagtcctatttttttttttttttgccgctcagaatgcatcccgtgctgcgacagatgcgcccccaacaacagcccccctcgcagcagcagcagcagcaaccacaaaaggctgtccctgcaactactgcaactgccgccgtgagcggtgcgggacagcccgcctatgatctggacttggaagagggcgaaggactggcacgtctaggtgcgccttcgcccgagcggcatccgcgagttcaactgaaaaaagattctcgcgaggcgtatgtgccccaacagaacctatttagagacagaagcggcgaggagccggaggagatgcgagcttcccgctttaacgcgggtcgtgagctgcgtcacggtttggaccgaagacgagtgttgcgagacgaggatttcgaagttgatgaagtgacagggatcagtcctgccagggcacacgtggctgcagccaaccttgtatcggcttacgagcagacagtaaaggaagagcgtaacttccaaaagtcttttaataatcatgtgcgaaccctgattgcccgcgaagaagttacccttggtttgatgcatttgtgggatttgatggaagctatcattcagaaccctactagcaaacctctgaccgcccagctgtttctggtggtgcaacacagcagagacaatgaggctttcagagaggcgctgctgaacatcaccgaacccgaggggagatggttgtatgatcttatcaacattctacagagtatcatagtgcaggagcggagcctgggcctggccgagaaggtagctgccatcaattactcggttttgagcttgggaaaatattacgctcgcaaaatctacaagactccatacgttcccatagacaaggaggtgaagatagatgggttctacatgcgcatgacgctcaaggtcttgaccctgagcgatgatcttggggtgtatcgcaatgacagaatgcatcgcgcggttagcgccagcaggaggcgcgagttaagcgacagggaactgatgcacagtttgcaaagagctctgactggagctggaaccgagggtgagaattacttcgacatgggagctgacttgcagtggcagcctaatcgcagggctctgagcgccgcgacggcaggatgtgagcttccttacatagaagaggcggatgaaggcgaggaggaagagggcgagtacttggaagactgatggcacaacccgtgttttttgctagatggaacagcaagcaccggatcccgcaatgcgggcggcgctgcagagccagccgtccggcattaactcctcggacgattggacccaggccatgcaacgtatcatggcgttgacgactcgcaaccccgaagcctttagacagcaaccccaggccaaccgtctatcggccatcatggaagctgtagtgccttcccgatctaatcccactcatgagaaggtcctggccatcgtgaacgcgttggtggagaacaaagctattcgtccagatgaggccggactggtatacaacgctctcttagaacgcgtggctcgctacaacagtagcaatgtgcaaaccaatttggaccgtatgataacagatgtacgcgaagccgtgtctcagcgcgaaaggttccagcgtgatgccaacctgggttcgctggtggcgttaaatgctttcttgagtactcagcctgctaatgtgccgcgtggtcaacaggattatactaactttttaagtgctttgagactgatggtatcagaagtacctcagagcgaagtgtatcagtccggtcctgattacttctttcagactagcagacagggcttgcagacggtaaatctgagccaagcttttaaaaaccttaaaggtttgtggggagtgcatgccccggtaggagaaagagcaaccgtgtctagcttgttaactccgaactcccgcctgttattactgttggtagctcctttcaccgacagcggtagcatcgaccgtaattcctatttgggttacctactaaacctgtatcgcgaagccatagggcaaagtcaggtggacgagcagacctatcaagaaattacccaagtcagtcgcgctttgggacaggaagacactggcagtttggaagccactctgaacttcttgcttaccaatcggtctcaaaagatccctcctcaatatgctcttactgcggaggaggagaggatccttagatatgtgcagcagagcgtgggattgtttctgatgcaagagggggcaactccgactgcagcactggacatgacagcgcgaaatatggagcccagcatgtatgccagtaaccgacctttcattaacaaactgctggactacttgcacagagctgccgctatgaactctgattatttcaccaatgccatcttaaacccgcactggctgcccccacctggtttctacacgggcgaatatgacatgcccgaccctaatgacggatttctgtgggacgacgtggacagcgatgttttttcacctctttctgatcatcgcacgtggaaaaaggaaggcggtgatagaatgcattcttctgcatcgctgtccggggtcatgggtgctaccgcggctgagcccgagtctgcaagtccttttcctagtctacccttttctctacacagtgtacgtagcagcgaagtgggtagaataagtcgcccgagtttaatgggcgaagaggagtacctaaacgattccttgctcagaccggcaagagaaaaaaatttcccaaacaatggaatagaaagtttggtggataaaatgagtagatggaagacttatgctcaggatcacagagacgagcctgggatcatggggactacaagtagagcgagccgtagacgccagcgccatgacagacagaggggtcttgtgtgggacgatgaggattcggccgatgatagcagcgtgttggacttgggtgggagaggaaggggcaacccgtttgctcatttgcgccctcgcttgggtggtatgttgtgaaaaaaaataaaaaagaaaaactcaccaaggccatggcgacgagcgtacgttcgttcttctttattatctgtgtctagtataatgaggcgagtcgtgctaggcggagcggtggtgtatccggagggtcctcctccttcgtacgagagcgtgatgcagcagcagcaggcgacggcggtgatgcaatccccactggaggctccctttgtgcctccgcgatacctggcacctacggagggcagaaacagcattcgttactcggaactggcacctcagtacgataccaccaggttgtatctggtggacaacaagtcggcggacattgcttctctgaactatcagaatgaccacagcaacttcttgaccacggtggtgcagaacaatgactttacccctacggaagccagcacccagaccattaactttgatgaacgatcgcggtggggcggtcagctaaagaccatcatgcatactaacatgccaaacgtgaacgagtatatgtttagtaacaagttcaaagcgcgtgtgatggtgtccagaaaacctcccgacggtgctgcagttggggatacttatgatcacaagcaggatattttggaatatgagtggttcgagtttactttgccagaaggcaacttttcagttactatgactattgatttgatgaacaatgccatcatagataattacttgaaagtgggtagacagaatggagtgcttgaaagtgacattggtgttaagttcgacaccaggaacttcaagctgggatgggatcccgaaaccaagttgatcatgcctggagtgtatacgtatgaagccttccatcctgacattgtcttactgcctggctgcggagtggattttaccgagagtcgtttgagcaaccttcttggtatcagaaaaaaacagccatttcaagagggttttaagattttgtatgaagatttagaaggtggtaatattccggccctcttggatgtagatgcctatgagaacagtaagaaagaacaaaaagccaaaatagaagctgctacagctgctgcagaagctaaggcaaacatagttgccagcgactctacaagggttgctaacgctggagaggtcagaggagacaattttgcgccaacacctgttccgactgcagaatcattattggccgatgtgtctgaaggaacggacgtgaaactcactattcaacctgtagaaaaagatagtaagaatagaagctataatgtgttggaagacaaaatcaacacagcctatcgcagttggtatctttcgtacaattatggcgatcccgaaaaaggagtgcgttcctggacattgctcaccacctcagatgtcacctgcggagcagagcaggtttactggtcgcttccagacatgatgaaggatcctgtcactttccgctccactagacaagtcagtaactaccctgtggtgggtgcagagcttatgcccgtcttctcaaagagcttctacaacgaacaagctgtgtactcccagcagctccgccagtccacctcgcttacgcacgtcttcaaccgctttcctgagaaccagattttaatccgtccgccggcgcccaccattaccaccgtcagtgaaaacgttcctgctctcacagatcacgggaccctgccgttgcgcagcagtatccggggagtccaacgtgtgaccgttactgacgccagacgccgcacctgtccctacgtgtacaaggcactgggcatagtcgcaccgcgcgtcctttcaagccgcactttctaaaaaaaaaatgtccattcttatctcgcccagtaataacaccggttggggtctgcgcgctccaagcaagatgtacggaggcgcacgcaaacgttctacccaacatcccgtgcgtgttcgcggacattttcgcgctccatggggtgccctcaagggccgcactcgcgttcgaaccaccgtcgatgatgtaatcgatcaggtggttgccgacgcccgtaattatactcctactgcgcctacatctactgtggatgcagttattgacagtgtagtggctgacgctcgcaactatgctcgacgtaagagccggcgaaggcgcattgccagacgccaccgagctaccactgccatgcgagccgcaagagctctgctacgaagagctagacgcgtggggcgaagagccatgcttagggcggccagacgtgcagcttcgggcgccagcgccggcaggtcccgcaggcaagcagccgctgtcgcagcggcgactattgccgacatggcccaatcgcgaagaggcaatgtatactgggtgcgtgacgctgccaccggtcaacgtgtacccgtgcgcacccgtccccctcgcacttagaagatactgagcagtctccgatgttgtgtcccagcggcgaggatgtccaagcgcaaatacaaggaagaaatgctgcaggttatcgcacctgaagtctacggccaaccgttgaaggatgaaaaaaaaccccgcaaaatcaagcgggttaaaaaggacaaaaaagaagaggaagatggcgatgatgggctggcggagtttgtgcgcgagtttgccccacggcgacgcgtgcaatggcgtgggcgcaaagttcgacatgtgttgagacctggaacttcggtggtctttacacccggcgagcgttcaagcgctacttttaagcgttcctatgatgaggtgtacggggatgatgatattcttgagcaggcggctgaccgattaggcgagtttgcttatggcaagcgtagtagaataacttccaaggatgagacagtgtcaatacccttggatcatggaaatcccacccctagtcttaaaccggtcactttgcagcaagtgttacccgtaactccgcgaacaggtgttaaacgcgaaggtgaagatttgtatcccactatgcaactgatggtacccaaacgccagaagttggaggacgttttggagaaagtaaaagtggatccagatattcaacctgaggttaaagtgagacccattaagcaggtagcgcctggtctgggggtacaaactgtagacattaagattcccactgaaagtatggaagtgcaaactgaacccgcaaagcctactgccacctccactgaagtgcaaacggatccatggatgcccatgcctattacaactgacgccgccggtcccactcgaagatcccgacgaaagtacggtccagcaagtctgttgatgcccaattatgttgtacacccatctattattcctactcctggttaccgaggcactcgctactatcgcagccgaaacagtacctcccgccgtcgccgcaagacacctgcaaatcgcagtcgtcgccgtagacgcacaagcaaaccgactcccggcgccctggtgcggcaagtgtaccgcaatggtagtgcggaacctttgacactgccgcgtgcgcgttaccatccgagtatcatcacttaatcaatgttgccgctgcctccttgcagatatggccctcacttgtcgccttcgcgttcccatcactggttaccgaggaagaaactcgcgccgtagaagagggatgttgggacgcggaatgcgacgctacaggcgacggcgtgctatccgcaagcaattgcggggtggttttttaccagccttaattccaattatcgctgctgcaattggcgcgataccaggcatagcttccgtggcggttcaggcctcgcaacgacattgacattggaaaaaaaacgtataaataaaaaaaaatacaatggactctgacactcctggtcctgtgactatgttttcttagagatggaagacatcaatttttcatccttggctccgcgacacggcacgaagccgtacatgggcacctggagcgacatcggcacgagccaactgaacgggggcgccttcaattggagcagtatctggagcgggcttaaaaattttggctcaaccataaaaacatacgggaacaaagcttggaacagcagtacaggacaggcgcttagaaataaacttaaagaccagaacttccaacaaaaagtagtcgatgggatagcttccggcatcaatggagtggtagatttggctaaccaggctgtgcagaaaaagataaacagtcgtttggacccgccgccagcaaccccaggtgaaatgcaagtggaggaagaaattcctccgccagaaaaacgaggcgacaagcgtccgcgtcccgatttggaagagacgctggtgacgcgcgtagatgaaccgccttcttatgaggaagcaacgaagcttggaatgcccaccactagaccgatagccccaatggccaccggggtgatgaaaccttctcagttgcatcgacccgtcaccttggatttgccccctccccctgctgctactgctgtacccgcttctaagcctgtcgctgccccgaaaccagtcgccgtagccaggtcacgtcccgggggcgctcctcgtccaaatgcgcactggcaaaatactctgaacagcatcgtgggtctaggcgtgcaaagtgtaaaacgccgtcgctgcttttaattaaatatggagtagcgcttaacttgcctatctgtgtatatgtgtcattacacgccgtcacagcagcagaggaaaaaaggaagaggtcgtgcgtcgacgctgagttactttcaagatggccaccccatcgatgctgccccaatgggcatacatgcacatcgccggacaggatgcttcggagtacctgagtccgggtctggtgcagttcgcccgcgccacagacacctacttcaatctgggaaataagtttagaaatcccaccgtagcgccgacccacgatgtgaccaccgaccgtagccagcggctcatgttgcgcttcgtgcccgttgaccgggaggacaatacatactcttacaaagtgcggtacaccctggccgtgggcgacaacagagtgctggatatggccagcacgttctttgacattaggggcgtgttggacagaggtcccagtttcaaaccctattctggtacggcttacaactctctggctcctaaaggcgctccaaatgcatctcaatggattgcaaaaggcgtaccaactgcagcagccgcaggcaatggtgaagaagaacatgaaacagaggagaaaactgctacttacacttttgccaatgctcctgtaaaagccgaggctcaaattacaaaagagggcttaccaataggtttggagatttcagctgaaaacgaatctaaacccatctatgcagataaactttatcagccagaacctcaagtgggagatgaaacttggactgacctagacggaaaaaccgaagagtatggaggcagggctctaaagcctactactaacatgaaaccctgttacgggtcctatgcgaagcctactaatttaaaaggtggtcaggcaaaaccgaaaaactcggaaccgtcgagtgaaaaaattgaatatgatattgacatggaattttttgataactcatcgcaaagaacaaacttcagtcctaaaattgtcatgtatgcagaaaatgtaggtttggaaacgccagacactcatgtagtgtacaaacctggaacagaagacacaagttccgaagctaatttgggacaacagtctatgcccaacagacccaactacattggcttcagagataactttattggactcatgtactataacagtactggtaacatgggggtgctggctggtcaagcgtctcagttaaatgcagtggttgacttgcaggacagaaacacagaactttcttaccaactcttgcttgactctctgggcgacagaaccagatactttagcatgtggaatcaggctgtggacagttatgatcctgatgtacgtgttattgaaaatcatggtgtggaagatgaacttcccaactattgttttccactggacggcataggtgttccaacaaccagttacaaatcaatagttccaaatggagaagataataataattggaaagaacctgaagtaaatggaacaagtgagatcggacagggtaatttgtttgccatggaaattaaccttcaagccaatctatggcgaagtttcctttattccaatgtggctctgtatctcccagactcgtacaaatacaccccgtccaatgtcactcttccagaaaacaaaaacacctacgactacatgaacgggcgggtggtgccgccatctctagtagacacctatgtgaacattggtgccaggtggtctctggatgccatggacaatgtcaacccattcaaccaccaccgtaacgctggcttgcgttaccgatctatgcttctgggtaacggacgttatgtgcctttccacatacaagtgcctcaaaaattcttcgctgttaaaaacctgctgcttctcccaggctcctacacttatgagtggaactttaggaaggatgtgaacatggttctacagagttccctcggtaacgacctgcgggtagatggcgccagcatcagtttcacgagcatcaacctctatgctacttttttccccatggctcacaacaccgcttccacccttgaagccatgctgcggaatgacaccaatgatcagtcattcaacgactacctatctgcagctaacatgctctaccccattcctgccaatgcaaccaatattcccatttccattccttctcgcaactgggcggctttcagaggctggtcatttaccagactgaaaaccaaagaaactccctctttggggtctggatttgacccctactttgtctattctggttctattccctacctggatggtaccttctacctgaaccacacttttaagaaggtttccatcatgtttgactcttcagtgagctggcctggaaatgacaggttactatctcctaacgaatttgaaataaagcgcactgtggatggcgaaggctacaacgtagcccaatgcaacatgaccaaagactggttcttggtacagatgctcgccaactacaacatcggctatcagggcttctacattccagaaggatacaaagatcgcatgtattcatttttcagaaacttccagcccatgagcaggcaggtggttgatgaggtcaattacaaagacttcaaggccgtcgccataccctaccaacacaacaactctggctttgtgggttacatggctccgaccatgcgccaaggtcaaccctatcccgctaactatccctatccactcattggaacaactgccgtaaatagtgttacgcagaaaaagttcttgtgtgacagaaccatgtggcgcataccgttctcgagcaacttcatgtctatgggggcccttacagacttgggacagaatatgctctatgccaactcagctcatgctctggacatgacctttgaggtggatcccatggatgagcccaccctgctttatcttctcttcgaagttttcgacgtggtcagagtgcatcagccacaccgcggcatcatcgaggcagtctacctgcgtacaccgttctcggccggtaacgctaccacgtaagaagcttcttgcttcttgcaaatagcagctgcaaccatggcctgcggatcccaaaacggctccagcgagcaagagctcagagccattgtccaagacctgggttgcggaccctattttttgggaacctacgataagcgcttcccggggttcatggcccccgataagctcgcctgtgccattgtaaatacggccggacgtgagacggggggagagcactggttggctttcggttggaacccacgttctaacacctgctacctttttgatccttttggattctcggatgatcgtctcaaacagatttaccagtttgaatatgagggtctcctgcgccgcagcgctcttgctaccaaggaccgctgtattacgctggaaaaatctacccagaccgtgcagggcccccgttctgccgcctgcggacttttctgctgcatgttccttcacgcctttgtgcactggcctgaccgtcccatggacggaaaccccaccatgaaattgctaactggagtgccaaacaacatgcttcattctcctaaagtccagcccaccctgtgtgacaatcaaaaagcactctaccattttcttaatacccattcgccttattttcgctctcatcgtacacacatcgaaagggccactgcgttcgaccgtatggatgttcaataatgactcatgtaaacaacgtgttcaataaacatcactttatttttttacatgtatcaaggctctggattacttatttatttacaagtcgaatgggttctgacgagaatcagaatgacccgcaggcagtgatacgttgcggaactgatacttgggttgccacttgaattcgggaatcaccaacttgggaaccggtatatcgggcaggatgtcactccacagctttctggtcagctgcaaagctccaagcaggtcaggagccgaaatcttgaaatcacaattaggaccagtgctctgagcgcgagagttgcggtacaccggattgcagcactgaaacaccatcagcgacggatgtctcacgcttgccagcacggtgggatctgcaatcatgcccacatccagatcttcagcattggcaatgctgaacggggtcatcttgcaggtctgcctacccatggcgggcacccaattaggcttgtggttgcaatcgcagtgcagggggatcagtatcatcttggcctgatcctgtctgattcctggatacacggctctcatgaaagcatcatattgcttgaaagcctgctgggctttactaccctcgggataaaacatcccgcaggacctgctcgaaaactggttagcctgcacagccggcatcattcacacagcagcgggcgtcattgttggctatttgcaccacacttctgccccagcggttttgggtgattttggttcgctcgggattctcctttaaggctcgttgtccgttctcgctggccacatccatctcgataatctgctccttctgaatcataatattgccatgcaggcacttcagcttgccctcataatcattgcagccatgaggccacaacgcacagcctgtacattcccaattatggtgggcgatctgagaaaaagaatgtatcattccctgcagaaatcttcccatcatcgtgctcagtgtcttgtgactagtgaaagttaactggatgcctcggtgctcttcgtttacgtactggtgacagatgcgcttgtattgttcgtgttgctcaggcattagtttaaaacaggttctaagttcgttatccagcctgtacttctccatcagcagacacatcacttccatgcctttctcccaagcagacaccaggggcaagctaatcggattcttaacagtgcaggcagcagctcctttagccagagggtcatctttagcgatcttctcaatgcttcttttgccatccttctcaacgatgcgcacgggcgggtagctgaaacccactgctacaagttgcgcctcttctctttcttcttcgctgtcttgactgatgtcttgcatggggatatgtttggtcttccttggcttctttttggggggtatcggaggaggaggactgtcgctccgttccggagacagggaggattgtgacgtttcgctcaccattaccaactgactgtcggtagaagaacctgaccccacacggcgacaggtgtttttcttcgggggcagaggtggaggcgattgcgaagggctgcggtccgacctggaaggcggatgactggcagaaccccttccgcgttcgggggtgtgctccctgtggcggtcgcttaactgatttccttcgcggctggccattgtgttctcctaggcagagaaacaacagacatggaaactcagccattgctgtcaacatcgccacgagtgccatcacatctcgtcctcagcgacgaggaaaaggagcagagcttaagcattccaccgcccagtcctgccaccacctctaccctagaagataaggaggtcgacgcatctcatgacatgcagaataaaaaagcgaaagagtctgagacagacatcgagcaagacccgggctatgtgacaccggtggaacacgaggaagagttgaaacgctttctagagagagaggatgaaaactgcccaaaacagcgagcagataactatcaccaagatgctggaaatagggatcagaacaccgactacctcatagggcttgacggggaagacgcgctccttaaacatctagcaagacagtcgctcatagtcaaggatgcattattggacagaactgaagtgcccatcagtgtggaagagctcagctgcgcctacgagcttaaccttttttcacctcgtactccccccaaacgtcagccaaacggcacctgcgagccaaatcctcgcttaaacttttatccagcttttgctgtgccagaagtactggctacctatcacatcttttttaaaaatcaaaaaattccagtctcctgccgcgctaatcgcacccgcgccgatgccctactcaatctgggacctggttcacgcttacctgatatagcttccttggaagaggttccaaagatcttcgagggtctgggcaataatgagactcgggccgcaaatgctctgcaaaagggagaaaatggcatggatgagcatcacagcgttctggtggaattggaaggcgataatgccagactcgcagtactcaagcgaagcgtcgaggtcacacacttcgcatatcccgctgtcaacctgccccctaaagtcatgacggcggtcatggaccagttactcattaagcgcgcaagtcccctttcagaagacatgcatgacccagatgcctgtgatgagggtaaaccagtggtcagtgatgagcagctaacccgatggctgggcaccgactctccccgggatttggaagagcgtcgcaagcttatgatggccgtggtgctggttaccgtagaactagagtgtctccgacgtttctttaccgattcagaaaccttgcgcaaactcgaagagaatctgcactacacttttagacacggctttgtgcggcaggcatgcaagatatctaacgtggaactcaccaacctggtttcctacatgggtattctgcatgagaatcgcctaggacaaagcgtgctgcacagcacccttaagggggaagcccgccgtgattacatccgcgattgtgtctatctctacctgtgccacacgtggcaaaccggcatgggtgtatggcagcaatgtttagaagaacagaacttgaaagagcttgacaagctcttacagaaatctcttaaggttctgtggacagggttcgacgagcgcaccgtcgcttccgacctggcagacctcatcttcccagagcgtctcagggttactttgcgaaacggattgcctgactttatgagccagagcatgcttaacaattttcgctctttcatcctggaacgctccggtatcctgcccgccacctgctgcgcactgccctccgactttgtgcctctcacctaccgcgagtgccccccgccgctatggagtcactgctacctgttccgtctggccaactatctctcctaccactcggatgtgatcgaggatgtgagcggagacggcttgctggagtgccactgccgctgcaatctgtgcacgccccaccggtccctagcttgcaacccccagttgatgagcgaaacccagataataggcacctttgaattgcaaggccccagcagccaaggcgatgggtcttctcctgggcaaagtttaaaactgaccccgggactgtggacctccgcctacttgcgcaagtttgctccggaagattaccacccctatgaaatcaagttctatgaggaccaatcacagcctccaaaggccgaactttcggcttgcgtcatcacccagggggcaattctggcccaattgcaagccatccaaaaatcccgccaagaatttctactgaaaaagggtaagggggtctaccttgacccccagaccggcgaggaactcaacacaaggttccctcaggatgtcccaacgacgagaaaacaagaagttgaaggtgcagccgccgcccccagaagatatggaggaagattgggacagtcaggcagaggaggcggaggaggacagtctggaggacagtctggaggaagacagtttggaggaggaaaacgaggaggcagaggaggtggaagaagtaaccgccgacaaacagttatcctcggctgcggagacaagcaacagcgctaccatctccgctccgagtcgaggaacccggcggcgtcccagcagtagatgggacgagaccggacgcttcccgaacccaaccagcgcttccaagaccggtaagaaggatcggcagggatacaagtcctggcgggggcataagaatgccatcatctcctgcttgcatgagtgcgggggcaacatatccttcacgcggcgctacttgctattccaccatggggtgaactttccgcgcaatgttttgcattactaccgtcacctccacagcccctactatagccagcaaatcccgacagtctcgacagataaagacagcggcggcgacctccaacagaaaaccagcagcggcagttagaaaatacacaacaagtgcagcaacaggaggattaaagattacagccaacgagccagcgcaaacccgagagttaagaaatcggatctttccaaccctgtatgccatcttccagcagagtcggggtcaagagcaggaactgaaaataaaaaaccgatctctgcgttcgctcaccagaagttgtttgtatcacaagagcgaagatcaacttcagcgcactctcgaggacgccgaggctctcttcaacaagtactgcgcgctgactcttaaagagtaggcagcgaccgcgcttattcaaaaaaggcgggaattacatcatcctcgacatgagtaaagaaattcccacgccttacatgtggagttatcaaccccaaatgggattggcagcaggcgcctcccaggactactccacccgcatgaattggctcagcgccgggccttctatgatttctcgagttaatgatatacgcgcctaccgaaaccaaatacttttggaacagtcagctcttaccaccacgccccgccaacaccttaatcccagaaattggcccgccgccctagtgtaccaggaaagtcccgctcccaccactgtattacttcctcgagacgcccaggccgaagtccaaatgactaatgcaggtgcgcagttagctggcggctccaccctatgtcgtcacaggcctcggcataatataaaacgcctgatgatcagaggccgaggtatccagctcaacgacgagtcggtgagctctccgcttggtctacgaccagacggaatctttcagattgccggctgcgggagatcttccttcacccctcgtcaggctgttctgactttggaaagttcgtcttcgcaaccccgctcgggcggaatcgggaccgttcaatttgtagaggagtttactccctctgtctacttcaaccccttctccggatctcctgggcactacccggacgagttcataccgaacttcgacgcgattagcgagtcagtggacggctacgattgatgtctggtgacgcggctgagctatctcggctgcgacatctagaccactgccgccgctttcgctgctttgcccgggaacttattgagttcatctacttcgaactccccaaggatcaccctcaaggtccggcccacggagtgcggattactatcgaaggcaaaatagactctcgcctgcaacgaattttctcccagcggcccgtgctgatcgagcgagaccagggaaacaccacggtttccatctactgcatttgtaatcaccccggattgcatgaaagcctttgctgtcttatgtgtactgagtttaataaaaactgaattaagactctcctacggactgccgcttcttcaacccggattttacaaccagaagaacaaaacttttcctgtcgtccaggactctgttaacttcacctttcctactcacaaactagaagctcaacgactacaccgcttttccagaagcattttccctactaatactactttcaaaaccggaggtgagctccacggtctccctacagaaaacccttgggtggaagcgggccttgtagtactaggaattcttgcgggtgggcttgtgattattctttgctacctatacacaccttgcttcactttcctagtggtgttgtggtattggtttaaaaaatggggcccatactagtcttgcttgttttactttcgcttttggaaccgggttctgccaattacgatccatgtctagactttgacccagaaaactgcacacttacttttgcacccgacacaagccgcatctgtggagttcttattaagtgcggatgggaatgcaggtccgttgaaattacacacaataacaaaacctggaacaataccttatccaccacatgggagccaggagttcccgagtggtacactgtctctgtccgaggtcctgacggttccatccgcattagtaacaacactttcattttttctgaaatgtgcgatctggccatgttcatgagcaaacagtattctctatggcctcctagcaaggacaacatcgtaacgttctccattgcttattgcttgtgcgcttgccttcttactgctttactgtgcgtatgcatacacctgcttgtaaccactcgcatcaaaaacgccaataacaaagaaaaaatgccttaacctctttctgtttacagacatggcttctcttacatctctcatatttgtcagcattgtcactgccgctcacggacaaacagtcgtctctatcccactaggacataattacactctcataggacccccaatcacttcagaggtcatctggaccaaactgggaagcgttgattactttgatataatctgtaacaaaacaaaaccaataatagtaacttgcaacatacaaaatcttacattgattaatgttagcaaagtttacagcggttactattatggttatgacagatacagtagtcaatatagaaattacttggttcgtgttacccagttgaaaaccacgaaaatgccaaatatggcaaagattcgatccgatgacaattctctagaaacttttacatctcccaccacacccgacgaaaaaaacatcccagattcaatgattgcaattgttgcagcggtggcagtggtgatggcactaataataatatgcatgcttttatatgcttgtcgctacaaaaagtttcatcctaaaaaacaagatctcctactaaggcttaacatttaatttctttttatacagccatggtttccactaccacattccttatgcttactagtctcgcaactctgacttctgctcgctcacacctcactgtaactataggctcaaactgcacactaaaaggacctcaaggtggtcatgtcttttggtggagaatatatgacaatggatggtttacaaaaccatgtgaccaacctggtagatttttctgcaacggcagagacctaaccattatcaacgtgacagcaaatgacaaaggcttctattatggaaccgactataaaagtagtttagattataacattattgtactgccatctaccactccaccaccccgcacaactactttctctagcagcagtgtcgctaacaatacaatttccaatccaacctttgccgcgcttttaaaacgcactgtgaataattctacaacttcacatacaacaatttccacttcaacaatcagcatcatcgctgcagtgacaattggaatatctattcttgtttttaccataacctactacgcctgctgctatagaaaagacaaacataaaggtgatccattacttagatttgatatttaatttgttctttttttttatttacagtatggtgaacaccaatcatggtacctagaaatttcttcttcaccatactcatctgtgcttttaatgtttgcgctactttcacagcagtagccacagcaaccccagactgtataggagcatttgcttcctatgcactttttgcttttgttacttgcatctgcgtatgtagcatagtctgcctggttattaattttttccaacttctagactggatccttgtgcgaattgcctacctgcgccaccatcccgaataccgcaaccaaaatatcgcggcacttcttagactcatctaaaaccatgcaggctatactaccaatatttttgcttctattgcttccctacgctgtctcaaccccagctgcctatagtactccaccagaacaccttagaaaatgcaaattccaacaaccgtggtcatttcttgcttgctatcgagaaaaatcagaaatccccccaaatttaataatgattgctggaataattaatataatctgttgcaccataatttcatttttgatataccccctatttgattttggctggaatgctcccaatgcacatgatcatccacaagacccagaggaacacattcccccacaaaacatgcaacatccaatagcgctaatagattacgaaagtgaaccacaacccccactactccctgctattagttacttcaacctaaccggcggagatgactgaaacactcaccacctccaattccgccgaggatctgctcgatatggacggccgcgtctcagaacaacgacttgcccaactacgcatccgccagcagcaggaacgcgtggccaaagagctcagagatgtcatccaaattcaccaatgcaaaaaaggcatattctgtttggtaaaacaagccaagatatcctacgagatcaccgctactgaccatcgcctctcttacgaacttggcccccaacgacaaaaatttacctgcatggtgggaatcaaccccatagttatcacccaacaaagtggagatactaagggttgcattcactgttcctgcgattccatcgagtgcacctacaccctgctgaagaccctatgcggcctaagagacctgctaccaatgaattaaaaaaaaatgattaataaaaaatcacttacttgaaatcagcaataaggtctctgttgaaattttctcccagcagcacctcacttccctcttcccaactctggtattctaaaccccgttcagcggcatactttctccatactttaaaggggatgtcaaattttagctcctctcctgtacccacaatcttcatgtctttcttcccagatgaccaagagagtccggctcagtgactccttcaaccctgtctacccctatgaagatgaaagcacctcccaacaccccttttataacccagggtttatttccccaaatggcttcacacaaagcccagacggagttcttactttaaaatgtttaaccccactaacaaccacaggcggatctctacagctaaaagtgggagggggacttacagtggatgacactgatggtaccttacaagaaaacatacgtgctacagcacccattactaaaaataatcactctgtagaactatccattggaaatggattagaaactcaaaacaataaactatgtgccaaattgggaaatgggttaaaatttaacaacggtgacatttgtataaaggatagtattaacaccttatggactggaataaaccctccacctaactgtcaaattgtggaaaacactaatacaaatgatggcaaacttactttagtattagtaaaaaatggagggcttgttaatggctacgtgtctctagttggtgtatcagacactgtgaaccaaatgttcacacaaaagacagcaaacatccaattaagattatattttgactcttctggaaatctattaactgaggaatcagacttaaaaattccacttaaaaataaatcttctacagcgaccagtgaaactgtagccagcagcaaagcctttatgccaagtactacagcttatcccttcaacaccactactagggatagtgaaaactacattcatggaatatgttactacatgactagttatgatagaagtctatttcccttgaacatttctataatgctaaacagccgtatgatttcttccaatgttgcctatgccatacaatttgaatggaatctaaatgcaagtgaatctccagaaagcaacatagctacgctgaccacatccccctttttcttttcttacattacagaagacgacaactaaaataaagtttaagtgtttttatttaaaatcacaaaattcgagtagttattttgcctccaccttcccatttgacagaatacaccaatctctccccacgcacagctgttaaacatttggataccattagagatagacattgttttagattccacattccaaacagtttcagagcgagccaatctggggtcagtgatagataaaaatccatcgcgatagtcttttaaagcgctttcacagtccaactgctgcggatgcgactccggagtttggatcacggtcatctggaagaagaacgatgggaatcataatccgaaaacggtatcggacgattgtgtctcatcaaacccacaagcagccgctgtctgcgtcgctccgtgcgactgctgtttatgggatcagggtccacagtttcctgaagcatgattttaatagcccttaacatcaactttctggtgcgatgcgcgcagcaacgcattctgatttcactcaaatctttgcagtaggtacaacacattattacaatattgtttaataaaccataattaaaagcgctccagccaaaactcatatctgatataatcgcccctgcatgaccatcataccaaagtttaatataaattaaatgacgttccctcaaaaacacactacccacatacatgatctcttttggcatgtgcatattaacaatctgtctgtaccatggacaacgttggttaatcatgcaacccaatataaccttccggaaccacactgccaacaccgctcccccagccatgcattgaagtgaaccctgctgattacaatgacaatgaagaacccaattctctcgaccgtgaatcacttgagaatgaaaaatatctatagtggcacaacatagacataaatgcatgcatcttctcataatttttaactcctcaggatttagaaacatatcccagggaataggaagctcttgcagaacagtaaagctggcagaacaaggaagaccacgaacacaacttacactatgcatagtcatagtatcacaatctggcaacagcgggtggtcttcagtcatagaagctcgggtttcattttcctcacaacgtggtaactgggctctggtgtaagggtgatgtctggcgcatgatgtcgagcgtgcgcgcaaccttgtcataatggagttgcttcctgacattctcgtattttgtatagcaaaacgcggccctggcagaacacactcttcttcgccttctatcctgccgcttagcgtgttccgtgtgatagttcaagtacagccacactcttaagttggtcaaaagaatgctggcttcagttgtaatcaaaactccatcgcatctaattgttctgaggaaatcatccacggtagcatatgcaaatcccaaccaagcaatgcaactggattgcgtttcaagcaggagaggagagggaagagacggaagaaccatgttaatttttattccaaacgatctcgcagtacttcaaattgtagatcgcgcagatggcatctctcgcccccactgtgttggtgaaaaagcacagctaaatcaaaagaaatgcgattttcaaggtgctcaacggtggcttccaacaaagcctccacgcgcacatccaagaacaaaagaataccaaaagaaggagcattttctaactcctcaatcatcatattacattcctgcaccattcccagataattttcagctttccagccttgaattattcgtgtcagttcttgtggtaaatccaatccacacattacaaacaggtcccggagggcgccctccaccaccattcttaaacacaccctcataatgacaaaatatcttgctcctgtgtcacctgtagcgaattgagaatggcaacatcaattgacatgcccttggctctaagttcttctttaagttctagttgtaaaaactctctcatattatcaccaaactgcttagccagaagccccccgggaacaagagcaggggacgctacagtgcagtacaagcgcagacctccccaattggctccagcaaaaacaagattggaataagcatattgggaaccaccagtaatatcatcgaagttgctggaaatataatcaggcagagtttcttgtagaaattgaataaaagaaaaatttgccaaaaaaacattcaaaacctctgggatgcaaatgcaataggttaccgcgctgcgctccaacattgttagttttgaattagtctgcaaaaataaaaaaaaaacaagcgtcatatcatagtagcctgacgaacaggtggataaatcagtctttccatcacaagacaagccacagggtctccagctcgaccctcgtaaaacctgtcatcgtgattaaacaacagcaccgaaagttcctcgcggtgaccagcatgaataagtcttgatgaagcatacaatccagacatgttagcatcagttaaggagaaaaaacagccaacatagcctttgggtataattatgcttaatcgtaagtatagcaaagccacccctcgcggatacaaagtaaaaggcacaggagaataaaaaatataattatttctctgctgctgtttaggcaacgtcgcccccggtccctctaaatacacatacaaagcctcatcagccatggcttaccagagaaagtacagcgggcacacaaaccacaagctctaaagtcactctccaacctctccacaatatatatacacaagccctaaactgacgtaatgggactaaagtgtaaaaaatcccgccaaacccaacacacaccccgaaactgcgtcaccagggaaaagtacagtttcacttccgcaatcccaacaagcgtcacttcctctttctcacggtacgtcacatcccattaacttacaacgtcattttcccacggccgcgccgccccttttaaccgttaaccccacagccaatcaccacacggcccacactttttaaaatcacctcatttacatattggcaccattccatctataaggtatattattgatgatg

SEQ ID NO: 210 - protein, 1468 aa, Unknown
  ET3
MQLELSTCVFLCLLPLGFSAIRRYYLGAVELSWDYRQSELLRELHVDTRFPATAPGALPLGPSVLYKKTVFVEFTDQLFSVARPRPPWMGLLGPTIQAEVYDTVVVTLKNMASHPVSLHAVGVSFWKSSEGAEYEDHTSQREKEDDKVLPGKSQTYVWQVLKENGPTASDPPCLTYSYLSHVDLVKDLNSGLIGALLVCREGSLTRERTQNLHEFVLLFAVFDEGKSWHSARNDSWTRAMDPAPARAQPAMHTVNGYVNRSLPGLIGCHKKSVYWHVIGMGTSPEVHSIFLEGHTFLVRHHRQASLEISPLTFLTAQTFLMDLGQFLLFCHISSHHHGGMEAHVRVESCAEEPQLRRKADEEEDYDDNLYDSDMDVVRLDGDDVSPFIQIRSVAKKHPKTWVHYIAAEEEDWDYAPLVLAPDDRSYKSQYLNNGPQRIGRKYKKVRFMAYTDETFKTREAIQHESGILGPLLYGEVGDTLLIIFKNQASRPYNIYPHGITDVRPLYSRRLPKGVKHLKDFPILPGEIFKYKWTVTVEDGPTKSDPRCLTRYYSSFVNMERDLASGLIGPLLICYKESVDQRGNQIMSDKRNVILFSVFDENRSWYLTENIQRFLPNPAGVQLEDPEFQASNIMHSINGYVFDSLQLSVCLHEVAYWYILSIGAQTDFLSVFFSGYTFKHKMVYEDTLTLFPFSGETVFMSMENPGLWILGCHNSDFRNRGMTALLKVSSCDKNTGDYYEDSYEDISAYLLSKNNAIEPRSFAQNSRPPSASAPKPPVLRRHQRDISLPTFQPEEDKMDYDDIFSTETKGEDFDIYGEDENQDPRSFQKRTRHYFIAAVEQLWDYGMSESPRALRNRAQNGEVPRFKKVVFREFADGSFTQPSYRGELNKHLGLLGPYIRAEVEDNIMVTFKNQASRPYSFYSSLISYPDDQEQGAEPRHNFVQPNETRTYFWKVQHHMAPTEDEFDCKAWAYFSDVDLEKDVHSGLIGPLLICRANTLNAAHGRQVTVQEFALFFTIFDETKSWYFTENVERNCRAPCHLQMEDPTLKENYRFHAINGYVMDTLPGLVMAQNQRIRWYLLSMGSNENIHSIHFSGHVFSVRKKEEYKMAVYNLYPGVFETVEMLPSKVGIWRIECLIGEHLQAGMSTTFLVYSKKCQTPLGMASGHIRDFQITASGQYGQWAPKLARLHYSGSINAWSTKEPFSWIKVDLLAPMIIHGIKTQGARQKFSSLYISQFIIMYSLDGKKWQTYRGNSTGTLMVFFGNVDSSGIKHNIFNPPIIARYIRLHPTHYSIRSTLRMELMGCDLNSCSMPLGMESKAISDAQITASSYFTNMFATWSPSKARLHLQGRSNAWRPQVNNPKEWLQVDFQKTMKVTGVTTQGVKSLLTSMYVKEFLISSSQDGHQWTLFFQNGKVKVFQGNQDSFTPVVNSLDPPLLTRYLRIHPQSWVHQIALRMEVLGCEAQDLYV

SEQ ID NO: 211 - protein, 147 aa, Unknown
  Beta-globin
MVHLTPEEKSAVTALWGKVNVDEVGGEALGRLLVVYPWTQRFFESFGDLSTPDAVMGNPKVKAHGKKVLGAFSDGLAHLDNLKGTFATLSELHCDKLHVDPENFRLLGNVLVCVLAHHFGKEFTPPVQAAYQKVVAGVANALAHKYH

SEQ ID NO: 212 - protein, 147 aa, Unknown
  Gamma-globin
MGHFTEEDKATITSLWGKVNVEDAGGETLGRLLVVYPWTQRFFDSFGNLSSASAIMGNPKVKAHGKKVLTSLGDATKHLDDLKGTFAQLSELHCDKLHVDPENFKLLGNVLVTVLAIHFGKEFTPEVQASWQKMVTAVASALSSRYH

SEQ ID NO: 213 - protein, 32 aa, Artificial Sequence
  Synthetic
SGGSSGGSSGSETPGTSESATPESSGGSSGGS

SEQ ID NO: 214 - protein, 319 aa, Human mastadenovirus B; identical to SEQ ID NO: 13

SEQ ID NO: 215 - protein, 544 aa, Human mastadenovirus B; identical to SEQ ID NO: 16

SEQ ID NO: 216 - protein, 944 aa, Human mastadenovirus B; identical to SEQ ID NO: 17

SEQ ID NO: 217 - protein, 325 aa, Human adenovirus 7; identical to SEQ ID NO: 31

SEQ ID NO: 218 - protein, 544 aa, Human adenovirus 7; identical to SEQ ID NO: 34

SEQ ID NO: 219 - protein, 934 aa, Human adenovirus 7; identical to SEQ ID NO: 35

SEQ ID NO: 220 - protein, 325 aa, Human mastadenovirus B; identical to SEQ ID NO: 49

SEQ ID NO: 221 - protein, 561 aa, Human mastadenovirus B; identical to SEQ ID NO: 52

SEQ ID NO: 222 - protein, 948 aa, Human mastadenovirus B; identical to SEQ ID NO: 53

SEQ ID NO: 223 - protein, 325 aa, Human adenovirus 14; identical to SEQ ID NO: 67

SEQ ID NO: 224 - protein, 558 aa, Human adenovirus 14; identical to SEQ ID NO: 70

SEQ ID NO: 225 - protein, 945 aa, Human adenovirus 14; identical to SEQ ID NO: 71

SEQ ID NO: 226 - protein, 353 aa, Human adenovirus 16; identical to SEQ ID NO: 85

SEQ ID NO: 227 - protein, 555 aa, Human adenovirus 16; identical to SEQ ID NO: 88

SEQ ID NO: 228 - protein, 940 aa, Human adenovirus 16; identical to SEQ ID NO: 89

SEQ ID NO: 229 - protein, 323 aa, Human adenovirus 21; identical to SEQ ID NO: 103

SEQ ID NO: 230 - protein, 561 aa, Human adenovirus 21; identical to SEQ ID NO: 106

SEQ ID NO: 231 - protein, 949 aa, Human adenovirus 21; identical to SEQ ID NO: 107

SEQ ID NO: 232 - protein, 323 aa, Human adenovirus 34; identical to SEQ ID NO: 121

SEQ ID NO: 233 - protein, 558 aa, Human adenovirus 34; identical to SEQ ID NO: 124

SEQ ID NO: 234 - protein, 951 aa, Human adenovirus 34; identical to SEQ ID NO: 125

SEQ ID NO: 235 - protein, 365 aa, Human adenovirus D37
MSKRLRVEDDFNPVYPYGYARNQNIPFLTPPFVSSDGFKNFPPGVLSLKLADPITITNGDVSLKVGGGLTLQDGSLTVNPKAPLQVNTDKKLELAYDNPFESSANKLSLKVGHGLKVLDEKSAAGLKDLIGKLVVLTGKGIGTENLENTDGSSRGIGINVRAREGLTFDNDGYLVAWNPKYDTRTLWTTPDTSPNCTIAQDKDSKLTLVLTKCGSQILANVSLIVVAGKYHIINNKTNPKIKSFTIKLLFNKNGVLLDNSNLGKAYWNFRSGNSNVSTAYEKAIGFMPNLVAYPKPSNSKKYARDIVYGTIYLGGKPDQPAVIKTTFNQETGCEYSITFNFSWSKTYENVEFETTSFTFSYIAQE

SEQ ID NO: 236 - protein, 519 aa, Human adenovirus D37; identical to SEQ ID NO: 142

SEQ ID NO: 237 - protein, 949 aa, Human adenovirus D37; identical to SEQ ID NO: 143

SEQ ID NO: 238 - protein, 323 aa, Human adenovirus 50; identical to SEQ ID NO: 157

SEQ ID NO: 239 - protein, 560 aa, Human adenovirus 50; identical to SEQ ID NO: 160

SEQ ID NO: 240 - protein, 940 aa, Human adenovirus 50; identical to SEQ ID NO: 161

SEQ ID NO: 241 - protein, 581 aa, Human adenovirus 5; identical to SEQ ID NO: 175

SEQ ID NO: 242 - protein, 571 aa, Human adenovirus 5; identical to SEQ ID NO: 178

SEQ ID NO: 243 - protein, 952 aa, Human adenovirus 5; identical to SEQ ID NO: 179

SEQ ID NO: 244 - protein, 561 aa, Human adenovirus 35; identical to SEQ ID NO: 196

SEQ ID NO: 245 - protein, 952 aa, Human adenovirus 35; identical to SEQ ID NO: 197

SEQ ID NO: 246 - DNA, 32767 bp, Homo sapiens
gatcacgccattgcactccaccctgggcgacagagcgacgagaccccgtatcaaaaaaaaaaaaaagaaagaaagaaagaaaaaagaaaaaaaaaaggccgggcgcggtggctcacgcctgtaatcccagcactttgggaggccgaggcgggtgaatcacgaggtcaggagttcgagaccatcctggccaacatggtgaaaccccgtctctacaaaaaaaaaaaaaaaaattagccgggcgtggtggcgggcgcctgtaatcccagctactcgggaggctgagacaggaaaatcgcttgaacccgggaggcggagcttgcggtgagccgagattgcgccactgcactacagcctaggcgacagagcgagactccgtctcaaaaaaaaaaaaaaaaaaaaaaaacacttggaagccgacaggagatctttgagaccttgggcgaggcagtgacactaaaggcaggagcgactacagaagaataaattaaacttcatcagattaaaaactttactgcggccgggcgcggtggctcacgcctgaaatcccagcactttgggaggccgaggtgggcagatcatgagatcaggagatctagaccatcctggccaacatggtaaaaccccgtctctctactaaaaatacaaaaattagctgggtttggcggcgcctgcttctaatcccagctactcgggaggctgaggcaggagaatcgcttgaagccgggaggcggaggttgcagtgagccgagatcgtgccactgaactctggcctggcgacagagcgagactccatctcaaaacaaaacaaaaacttcggtgctttaaaggacaccatcaagaaaattaaaagtccacccacagaacgggagaaaatatttgtaagttacatatctgataagggaattgtatctagaatggaggaaacttacaactcaacaataaaaagacaattgaaaaatgcacaaaggatatgaatatttttccagtgcattatgcaaatggccaataagcaccagaagatgctcagctcaactggtagaggcttacgcctgtgaccccagcgctgagaggccaggaactccagaccagcctgggcaaaacagaaattaaaaatgctcaacattattaggcattagggagatgcaaatcaaaactacaaatagatgccacatcacacctcctacgatggctgtaatcaaaaagacaagcgtcagcaggggtgtggagaaacgggaatctctctcctgctggtgggaatgtaagaggctacactcgctatggaaaacaggctggcagttcctgaaaggttagagttaacacaacactcggcaaatcccccttttagatatatagccaagagaaatgaaagcatatgtccacacaaaaacatgtgtgttcttagtaatattattcataatagcccaaagtggaagcaatcctagggtatatcaattgatgaatgggtgaatatggtatagtttgtttaagggaatactattcagccataaaaaggaatgaagtacggcacatgaatccatcttgaagacacactaatatatgattccatttatataagatgcccagaataggcaaatccatagagacagaatgattagtggctgcctagggcttccagggggtcaggggaaatatggagcgattcatgggttttttgaaggggagtgatgaaaatgttctaacgttgactgtggtaatggttggacagctctgagaacgcgaatacactaaaagacatggaagtgccgggcgcagtggctcatgcctgtaatcccagcgctttgggaggccaaggcaggcggatcgcgaggtcaggagatcgagaccatcctggctaagacagtgaaaccccgtgtctactaaaaatacaaaaaattagctggacatggtgcgggcgcctgtagtcccagatactcaggaggctgaggcaggagaatggtgtgaacccgggaggcggagcttgcagtgagccaagatcgcaccattgcactccagcctgggcgacagagcgagactccatctcaaaaacaaaaaaaagatatggaagtgtacacttgaagtggataagctttatggtatgcaaattggtatggtatggtaaattatatctcaatgaagttgttttttaaaaaatcaccccacctaccctatcccaggcttccccaggaggtaactaaaggtaatgagcttctttggctgcttccagaactttcccaagcacatcaaatgcatcagaacctaaccacttgactgagggatgagcattttcactgttgcaagtaaccctcttgcaccaacactgacactaatgtgtattttgcagaacaaatttgtggattggcctcaccagggtgaagggtacgtgcatttgaaatggctcaacagtaccaacaggtgcgttttcttgcacagggctgcataacattttttttttttttttgagacagagtctcgctctatcacccaggctggagggcagtggcacaatctcagttcactgcaagctccacctaccaggttcacatcattctcctgcctcagcctcccaagtagctgggactacaggtgcccgccaccacaccaggctaattttttttttttttttgagatggagtcttgctctgtcgcccaggctggagtgcagtggcacgatctcagctcactgcaagctccacctcccaggttcacaccattctcctgcctcagcctccccagtagctgagactacaggcgcccgccaccacgtccggctaatttttttgtatttttagtagagacggggtttcaccgcgttagccaggatggtctcgatctcctgacctcttgatccacccgcctcggcctctcaaagtgctgggattacaggcgtgagccaccgtgcccggcctgcataacatttttttttttcctgaaattcccagaaaggaaaatggtgtcttgttctatgttgcatttctttgattgagagggagagctgcatcacttaattatttgcagagaattgcttttcttgttttctttacaggtggtctgttcttggatggtctggctgtgttctttctgaggaatacataacctctgctacacattttgcaaggctttatccccgttgtccatgttttgattttatgtataatcaaaaggtttgtgagttctcccgcacttcccaggagtgcctctgggatggaaatgagactgcaggagcagggcttgaggctggaggggtgagatgggacagatgggggtgggggaacccagggcagtggccggtggtggtaatggaggcctcctcacagggaccctcacagcgaccatgcgaatggagcaggactgtgactcaggtctcgctcttctgacctaatcgtgctgctgccccaatgggcagaaccttggggctccagactggacatctctgggctcaaaggatcccactgttcccccggttaccctctcagggttggcctcctgccagtaaccctggcactcattgttcattcttctgactatcgtcagtcataatgagagctcgaactggtgaaagtgcagggagctcaccatgaccccagcccacagaggtcctgggtgcgtccctgccctcgaagcagcactctggatcccagcgccaccctcatgtccatgtttgcacctcattggctgtgacagaaatgagacatcattgtcacacgctggcctgagggtcagtgggccttgctttggacctcagtttccccaccagtaacagggttcagagcagatggtccctgagtgagtcccagctctaagttctcccagggtctcctggacaatgaagcaccagggccaacctccatttgctacaggggacatcctcaggctcttctctgctaagaccccacacctccaagtctcctcattttacctttaaatagctgtttcatgacctgcttttttgacggtaagtagatttttggaaactgaaacccctgacccttcctcccagcctgggcctgcccttggcaggataggaggccttatcggtcctgccacttggtctgggcctcaaagggccaccgccatctgcaggagggccgggtggggttcacagacgctatctgggacttgcctggacacctccaccttctcagctgagtgttgctgccccaccagggagaaccactcacacacagtagtaatagaaataatttaaaattcatgctgcaagttcctgagcgccctcccaacactgaggtgggggctagtctaatccccatcctagaggtgaaaacagtgaaactaggactcacaaggcaaattagcctgttcagggtcaccgagggtccactctcatgggagagtttgcagatgcccaatccggcattctgctgagtgtccagtggcttgtaagtggccagacaccctttgagctcagcctcagctgctcaggcacagaacgtgcctggagcttggaattcaggccagaaaccaccagtggacaccagcattccacactcactgcacaggctggggctcaaaccaaggcccagggacaggaagggacaagccccagccccagccggactcccagcccacacaaaccatcagggcttgtttcctgctccatggaagcctcagacatgtttcataacctcctggagcctccgtttccttatctttccaatgtaatgatgcccatgtgcagtggctcacgcctgtaatcccaagcactttaggaggccgaggtgggtggatcactggagctcaggagtttgaggccagcctgggcaacatggcaaaacgccatctctactaaaaacacaaatattacccaggcatagtggcacatgcctatagtcccagctactcaggaggctgaggtgggaggatcacctgagcttgggaagttgagcctgcagtgagccaagattgtcacactgcactctagcctggaggacagagtaagaagaccctgtaacaaaacaaaacataacaaaacaaacaaacaaaaaacccaactaatgacaataaaataaaccctccctcacagggtggttgtgaggataaagcacccagaatgaagagtgttgctgccatgtgcagaacttagaaagtgctcaacagatgccagccaaacagacatggactcccctcaacacagtcaacccaaggttgactgtcaccaaacgcaaaagaccacactgtaaagcttttagaaatgtggtctagtggccgggcactgtggctcatgcctgtaatctcagcactttggaaggctgaggcgggcggatcacagggtcaggagttcgagaccagcctgaccacctgaccaacgtggtaaaaccccgtctctactaaagattcaaaaaattagccgggtgtagtgctacgtgcctgtaatcccagctgctcgggaggctgaggcaggagaatcgcttgaacccaggaggcggaggtacagtgagctgagatcgcgccattgcactccagcctgggagacagagagagactccgtctcaaaaaaaaaaaaaaaaaaaaagttagccgggtggtagtggcatgtacctgtaatcccagctacttgggaggctgaggtaggagaatcgcttgagcctgggaggtagagggttgcggtgagccaagatggcgccactgcactccaatctgggcgagacactgagaccctgtctcaaaaaaaaaaaaaaaatgtggtctaggagactctcttcactttgagataaaatttgcatcacgtaaagataaccattttaacgagagcaagtcaacggcattcagcacattcagagtgttgtgcaacaaccacttctccctggttccaggacattttcatcgcctcagatggaaacgccctcctcacggaggcatctctcccggcctttgtcctccccggccctgacaaccactaatctactttctgctgggatttgcccattctggatgtttcctaaaaatggcttatctaagccccacagtttcatgcagcacgtagcctctggtgtgtgacgtccttcacttggtgtaatggttcgaggcttgtccatgtcgtagcctgggtcagaacttcattttcatggctgaataatatctcacggtgtggaaatatcacagtttgcttatctgttcatccagtgatggacatttgggttgtttctaccttttggctattgggaatggaagggataacattttttaattggatttttaaagtcactagtttgactgcattaaaattacaaacttttgtttaacgagaatatcactaagatacagagttggggagatctaacacataaaagtgacaaaggaattatatccagaatatttttgaaatttctacaaatcagtgactggcaacacagtgggaaagtggccaagactaaaatactttaataaagaggaaaccgaaatggccagtaaatatgggctcaacctcactaattatcaggaaaatgtaaattaagaccacaagagaaaccactacacactcaccaaaaatcacacacccaataaaaaggtaatttttttttttttttgagatgaagtctcactctattgcccaggctggagtacaatggcgcgatcttggctcactgcaacctccgcctcctgggttcaagcgattctcctgcctcagcctcctgagtacctgggattacaggcgcacaccaccacacccagctaattttgcatttttaagtagagacggggtttcaccatgtgggcaaggctagtctcgaactcctgacctcgtgatctgcccgccttggcctcccaaagtgctgagattacaggcatcagccactgtgcccggcctaaaaaaggctaaaatttaagaagaccaggagtttgactgctatggttggaatgtttgtctcctctaaaactcttgttgaaacttaatccccagtgtggcagcgttgagaggtggggcctttggggtaaggaggttggatcatgagggtcctcccccaaggaatggattaatgagttgtcatgggagtgtggctggtggctttataagaagagagacctggccgggcacggtggctgacacctgtaatcccagcactttgtgaggccgagatgggcggatcacaaggtcaggggatcgagaccatcctggctaacacagtgaaaccctgtctctactaaaaaaaaaatgcaaaaaaattagccgggcgtggtggcgggcacctgtagtcccagctactaggaaggctgaggcaggagaatggcgtgaacctgggaggcggagcttgcagtgagccgagatcgcgccactgccctccagcctgggcgacagagcaagactctgtctcaaaaaaaaaaagaagagagatctgaggtggcacacaagcatgctcagcccacacgacctgcgattaatactctgtgccactttgggactctgcacgagtccccactgggctcgaaacttctcagcctccgtaactataggaaataaattccttttaaaataaattccacagtctcaggtattctattataagcaacagaaaatggagtactacaccgatcatatcaaatgtttagaaggatttggagcaaggagaatgctcgcacaccactagggaaaacataagttggttaaccactgtgaaaaagtttggcattctttactaaagttgaaaatctatatgccctatgacccagcaactttactcctaggtatgtatgtacaaaatagaatttcaggcatgtgggtaccaggtgacatgtaaaggaatgtttattgcagcattattcataatagccaagaactaaacaacacaaagttccagccccagtacaatgaataaactgtggtatattcctacaaggaaatattaatagatacagcaatgaaaatgaacacatataacatggctggtaaatctgacatgagagagtgaaagaagatggacattcagtgtgcagacagttggattaaaaatatttttttaaaggccaggcttggtggctcacatctataatcctagcacttacagaggccaaggcgggcagatcacctgaggtcaggagttcaggaccagcctggctaacacagtgaaaccccatctctactagaaaatacaaaaattagccaggtgtggtggtgcatgcctgtagtcccaactactcgggaggctgaggcaggagaatcacttgaacctaggaggcggaggttgcagtgagccaagatcgcatcactgtactccatcctgggtgacagagcaagactgcgtctcgaaaataaatagataaataaataaataaccaacaggccgggagcagtggctcatgcctgtaatcccagcactttgggaggctgaggtgggcagatcacgaggtcaggagatcaagaccatcctggctaacacagtgaaaccctgtctctactgaaaatacaaaaaaattagccgggcatggtggcgggcgcctgtagtcccagctactcaggaggctgaggcaggagaatggcatgaacccgggaggtggagcttgcagtgagccgagatcatgccactgcactccagcctgagcgacagagcgagactccatctcaaaaaaataataattaaaaataaataaattaaataaataaataacagattgcataaagtggctcatgcctgtaatccaagcactttgggaggccaaggcagaaggatcacttgagcccaggagttcaggacaagcctgagcaacatggtgaaaccccacctctacaaaaaaaaaaaaaaaattagctgggcatggtggcatgtgcctgtgatcccagctacttgggaggctgaggcaggaggatcacttaagcctgggaggtcgaggctgcaatgagctatgatcgtaccactgcactccagcctgggcaatagagcaagaccctgtctcaaaacaaataaacaaaagccagacagacacaaatgagagcattctgtatcgtttcatttctatgaaggtgaaaagcaggcaaaaacaaccaaagtgcttgcagatgcatatctgagtagttaaaaacttactgaaaagcaggcctggctcacgcctttaatcccagcactttgggaagcgggcggatcacgaggtcaggagatcgagaccatcctggctaacacggtgaaaccccgtctctactaaaaatataaaaaattagccaggtatggtggctagtgcctgtggtcccagctactcgagaggctgaggcaggagaatggcatgaatccgggaggtggagcttgcagtgagctaagatcgtgcaactgcactccagcctgggcagcagagcgagactccctctcaaaaaaaaaaaaacttactgaaaagcaagaagtcaggtggaggttacctttggggaggattggggtgctgtccgctttctaataattcgttaaactatagtctacatcttgtgctatatttcacaatggaaaaacagaaaagagctcctgcccataacgctgctttgcaggtttggaaatttcagattcaattcctctccttgcgggggccaaggatgggaagagcaggtggttccagtagggaaagaggaggccctggggcctcaaaatggctaaggaccattcctcagcgtgggtggcacctaccctggaaacaggactctacttcctcctctgttagggggcagagcagccctgcagtgccttctgggcacaggtcctcactctgcagctggaggaattctcccaggcactgagagcccttcacggcccaaatgccccgtgcgctcggcctctggacttgccttccctgctctgtatatctccctccgcctgaccctcagcctcctccatcactcactgtcttctctgccagtctattcatctgtctctgtccctctctctgccaccttctctcctattgagaagccgaaacctcaggcacagacccacatcccctcctcatgggcccatgtgcccaaggtgcccctaggtgccaggctgagatgaaccaggagtgtccttctgaacccagcaacagcgaagggtgaccagggagggccagttcatctcggtctgaaagaagccccagatgagcaaaggatacactggcctcctgcggtcagcagcacttcccaggacagtgagcaagacaggggtaaggccagagtgggtgggcacacccatgggagagaggagccgctgtgaaatgtgcacgaggaacagaccagcaaggaggatccacgcagtgctagaagggagttcctggaagcctggtggagagcccctcccatctgctaagcccggagggcatcaaaggctgctgctgccctcaacccctgacaatctcatcatctcatatctcaggcatggaagaatgagggccattacacgagtaaaacatcaagtacactccagcctggatgacagggccaggctccatctcaaaaaaaaatgcctgtggtcaaagctctcctgacaggggaaaacaaaacaaaacaaacttctccttaaagaaaacatttgcctttgactgcatcataattccagcaggattttgtgcagataactctttggctaactctaaaattaatacagaaaggtaaagaaattagaatagccaaagaaattttgaaaaggaagaataaagcgagaggaatcacattcctcaatttttaacagctctattgagataaaattcacataccatacggttcacccatttaaagtgtataattcaggccgggcgcggtggctcacgcctgtaatcccagcactttgggaggctgaagcgggcagatcacctgaggtcgggaattcgagaccagtctgaccaacatggagaaaccccgtctctactaaaaatacaaaattagccaggcgtggtggctcatgcctgtactcccagctactcggaagactgaggcaagagaattgcttgaacccgggagacggaggttgccatgagccgagatcgcgccaccacacccagctgccattttttaattgattacttgtctatttattactgagttgtaagatattttgggccaagcacggtggctaacgcctgtaatcccagcactttaggaggctatggtgggcaaatcacttgaggtcaggagttcgagaccaggctggccaacatggcaaaacaccatctctactaaaaatacaaaaaaattagccaggtgtggccaggcgtggtgactcacgcctgtaatcccagcactttgggaggccaaggcgggtggatcacctgaggtcgggggctcaagaccagcctgaccaacatggagaaaccccgactccgctaaaaatacaaaattagccgggtgtggtggtgcatgcctgtaatcccagctactcacgaagctgaggcaggagaatggcttgagcccaggaggcagaggttgtggtgagctgagatcatgccattgtactccagcctgggcgacaagagcgaaattctgtcacaaaaaaaaaaaaaccattagccagccatggtgatgcacacccgtggtcccagctactcaggaggctgaggtatgagaattgcttgaacccaggaggcagaggttgcagcgagccaggattacgccgctgcactccagtctgggtgacagagcaagactctgtctaaaaaaaaaacaaaaacaaaaaagatattttgtatgtgtttggataacttccctatcagatatatgatttgcaaatatgtttctctcattctgtgagacatcattcaattttaagacatcacagagctatgttaatcaaggcactgtggctgtggtaaaggatagacacacagaacagaacagagagcccagaaatggacccgcaaacctatgccccattcattttttacaaataagtgcgagaagccaactgaatagaaagcgtatagctttttcaaaaaacagtgctggaacaattggacatctgtaggcaaaaaaacaaacaagcaaacagaagaatctggacctgcccttcacacctcagacaaaagtcatctcaaaatggattgtagatctcaatataaacataaactatacaactttagaagaaaatataggtgaaactctttgtgttctgtggttaggcagacagttcctaggcatggcactaagtaagattcatttaaaattttttgacaaattggactttattaaaacttttgctctacaaaagacaatattaagagaatgaactaacaagctacaaactaagagaaaacatttgcaaattgcatatctgacaagggattgcttccagacgatacacagaattctaaaaattcatccttaagagaataaaccacccaatttttaaatgggcaaaacaggccaggcgtggtggtgcacgcctgtaatcctagcactttgggaggccgaggcaggcggatcacaaggtcaggagattgagaccatcctagctaacacggtgaaaccctgtctctactaaaaatacaaaaaattagccaggcatggtggcaggtgcctgtagtcccagctactcgggaggctgaggcaggagaatggcgtgaacctgggaggcggagcttgcagtgagtggagatcgcaccactgcgctccagcctgggcaacagagcgagactccgtctcaaaaaaaagacaaaatacttgaaaagatattggctaggcgcgctggctcatgcctgtaatcccagcactttgggaggccaaggcgggtggatcacaaggtcaggagttcaagcagcctggccaagatggtgaaaccccgtctctactaaaaaaaaaaaaaaaaaaaaaaaaaaaattggccgggcacagtggctcatgcctgtaatcccagcactttgggaggctgaggcaggtggatcaggagtcaggagatcgagaccatcctggccaacatggtgaaaccccatctctatgaaaatacaaaaattagccagagatgatgccgggtgcctgtaatcccagctactcatgaggctgaggcagaagaatcacttgaaccagggagtcagaggttgcagtgagctgagatcgcaccactgcactccaccctgggcgacaaatcgagattccatctcaaaaaaagaaaaaaaaattaaaaggaatatttgcctcattatgttacaataactaatatggaaagcaatattgcaatgcctattagcacatgacattaggtgaattctcctttgtccccggacctgctgcctcctcctgcttgtcaggggacagatccagtacatctcccctcagcgctgggtggacctaacccttgctttcttggaggaaacccaggaatccagagacaaagtggaagggtactggcatgtggttgggcagggctgcctgaggtcggtgtcagccgaccgtggggcttggtcccaggaggctgcttactgggccctgctcctctggtttcccccaagtcgtgattctgaaatgaataaggacggtgcagaactggactacaaatgcaggagtgacttcctgggagggtggggcccctatctctcctagactctgtggtcagactctggccaacaccccctgtaaggccacaggagaggaacaggagtgatagcccccaaaccccagtcccaccaggccctgagggcccctttgtcactggatctgataagaaacaccacccctgcagccccctcccctcacctgaccaatggccacagcctggctgggcccagctccctgtatataaggggaccctgggggctgagcactaccaaggccagtcctgagcaggcccaactccagtgcagctgcccaccctgccgccatgtctctgaccaagactgagaggaccatcattgtgtccatgtgggccaagatctccacgcaggccgacaccatcggcaccgagactctggagaggtgagtgtcagacgggactgccagagggactgggtgggaggccaggtatgtgagtggggacagtggggagggggcggtggggaggggacagtggggaggggaccatggagaggagacagtggggagggcactgtggggagaggacagtgaggaggggaccttggggaggggacagtgaggagggaaccgtggagaggggacagtgaggaagggacagtgaggacagatagcgttccctctcagtgaggagagcagggtaaggagggaacgattaggagttgcacaaccatctgggctcgctgagacctgggcaggcacaggcccaggttctgacaagcagagggtgaaaggtttcgttctaggcctgaagggccttacagggcagccagggcactacagcctctaaagtcccagcatctgggatcagggcactgtcccagcttcaaattcccagcatctgatcccctgggaggggccagggagcttttccttccctggaacgctgctgggaggtcatgagcctgcagaaggggtggcgggcaacccagtctggggctgggagggaggtcctgtggccagaggagacggtggaggggctgggggcaccaggcgtgctggaggcggagggcgggagatttggggaccaggctgcacagaacccgtcggaagcagggcgatcagccgggagctgcagaggcctggggggcctctagcccagggcagcctgggaggggcagctgcctgggcacccgggccccgcgaggaggggctggggcctgctgcggggtcgcagatgtgtcccggtgctcggagagggccgcagggcgcgtgggccgtggcgggaggccgcgctgctgggagctcacggcccccgccccccgtcccaggctcttcctcagccacccgcagaccaagacctacttcccgcacttcgacctgcacccggggtccgcgcagttgcgcgcgcacggctccaaggtggtggccgccgtgggcgacgcggtgaagagcatcgacgacatcggcggcgccctgtccaagctgagcgagctgcacgcctacatcctgcgcgtggacccggtcaacttcaaggtgcgcggggcgcggtgcgggcggggcgggacggggcggggcgcggtgcgggcggggcggggcggggcggggcggggaggggcggggaggggcggggtcgcggggcggatgcgggggtcgccgggcggggcccgggctaggccccgccccctcactgagccgcccccgcccccagctcctgtcccactgcctgctggtcaccctggccgcgcgcttccccgccgacttcacggccgaggcccacgccgcctgggacaagttcctatcggtcgtatcctctgtcctgaccgagaagtaccgctgagcgccgcctccgggacccccaggacaggctgcggcccctcccccgtcctggaggttccccagccccacttaccgcgtaatgcgccaataaaccaatgaacgaagcagcgtccacctggtctctgttgtccgtgggcggcgggcgcttggggaggcggagcgggaggagggcgccccggctgtctcggggccactgctgggccgcagggatccttgcaccgaccccagggtctctaagaggcagagggatgtgcagctcccggggcgggagcgggggtcactcgggacccaggcgtggtggagaaggggtgcagttaggcctttgcggaggggggagcagtgctggcgcccacccgccgcggctctccctgggacctccgtggtcttccttctttatttctcccgaatgtgtactatttcctgatttcagaacgatcaggacgaagaggggagggatgggcgtctgcgctcactcattccttcttccattcctcaatgaaacatttactgggcataagacagcctaggcatgtttctaggctatggataccgcagctgaaataaagaaagccctctgccccgtggggctgacaatctagtgggggatacagacgtgatgaagacagtcagatcacagttcacagaaatgagacaggaaaagaggctgagcctcactcataagagaaacgcaagttaaactacacaaaaataaaaaacctcactgagatccatgtctcacctccctgataggcaaaaatccaagagtttgatcagactgcaggcgcccctcctccactgggcacccctcatccagggcagagggaaccagcccggggcgcaagtccaccggggcatctcatttgctaaagacctgaaaacccaggtgtccatcatcaggactaactggaaaaaccaagggtatccgcaccatggagagctcgactgaaaaaaaaaaatgaggataattggataatttctttttttttttttttttttttcagacggagtctcgctctgtcgcccaggctggagtgcagtggtgcgatcccggctcactgcaagctccgcctcctggtttcaagcgattctcctgcctcagcctcccgagtagctgggtctacaggcgcccgccaccacggctggctaattttttgtatttttagtagagacggggtttcaccgtgttagccaggatggtctcgatctcctgacctcgtgatccacccgcctcggcctcccaaagtgctgggattacaggtgtgagccaccgcgcccgacctaaaatgaggataatttctaataatgaaaataaagaggttagaatggtgtgtatacaatggtggaacagaggagaaacacgaatatgtgtgtgcacatatatgtgagcttatgcataactatgtatgaggctgcgtgtggacatgtgtgtttgtgcacaaccatgtatgtgcccgcatgtgcttatttctgcaaaaataaaccatggcaggacaaaccggaaatgaatacaaataataaggtgggtggggatggaggggaaggtggaaggaagctcctgcaagtctgactctctacatagttttgacctttgatttgtgtaaatattttacattatcaaaaataaattcaggctgggcatggtggctcatacctgtagtcctagcactttgggagtccaaggggagaggattgcttgaggccaggagttgaaggccaccctggccaacatagagagaccctgtctttaaaaaaaattacaaaattaaggccgggcgcggtggctcacgcctgtaatcccagcactgtgggaggccgaggtgggcggatcacgaggtcaggagattgagaccgtcctggctaacacggtgaaaccccgtctctactaaaaagtagaagaaattagccgggtgtggtggcgggtgcctgtagtcccagctacttgggaggctgaggcaggagaatggtgtgaacccgggaggcggagcttgcagtgagccaggttcaagccactgcccttcagcctaggtgatagagtgagactccttctcaaaaaaaaaaaaaaaattacaaaattaataagattaaaataaaaagaggggccttgccagtggctcaagcctctaatcctaccacttgggaggccaaggctggaggatcccttgatgccaagagtcggaggccagcctaggtaacacagcaggacctcgtctcaaaaagattaaaaaattaactgggcatggtagcctccaaattgggggttagcctgggaggtttgcccaggaaggaattcaagggcaagctggtggtgttacacagcaactctgattgatatcgaagccacagcagacagcaggagcagaacactgctccttacagagcaggggtaccccataggctgtgtgcacaggagagcaactcagaggcactgctgcactcatctttatacccacttttcattatatgcaaattaagggaaagttatgcacaaatttctaggatgagtgtggtaacttctgggtggtccagtcactgccatggaaagggatggtaaactcccatggcacactggtgggtgtgtcttatggaaagctgcttctgccctacttgttttagctggtcctcagtttggtccggtgtccgagcccaacatccggagtacatgcagagtcccacctcctacgtcacacctgcagttccagctactcaggaggctgaggctggaggattgctggagcccagatgttgaaggctacagtgagctatgattgtgccaccgcacttcagcctgagcaacacagcaatactctctctctaaaaaagcaaagcacacaaacaaaaagagtgactgggtgcagtggctcacacttggaatcttagcactttgggaggccaaggtgggatggtcacttgagcctgggagttcaagaccagcctaggcaacatagcaagactttatctctactaaaatatatatatattttttaattagctggacatggtggtgcacctgcagtcccagctacttgggaggctgagttgggggtggaggggagtatcacttgagcccagaagttccaggctgtagtaagctatgattgcaccactgcactccagcctgggcaacagagagagaccttatctatatttaaaaaaaaaaaaaaaaagagagagaaaattgaaaactcctaattgaaaacccccaaattgaaaactaacttaaataaatgagccaatgtaagaatgtggtgatataataatcagaaaaaaggattgttccaggtgacctctgaacacagaacctcggctatgaccgaaagaactccaaagacactctaacactccgtggtttattgttcctcataacatatataaaataatttcataagcttttattttgaaacatattcagattatgaagaaataaaaacaccctgcaagaataagacaaagatggagaaggaaggatgactgctggtgggtttggggcttttggagggtgatggaaaccttctaaaattgattatggtgatggtcgcacaattatgtgaacacattaaaaattattgaaatgggccgggggtggtggctcacccctgtaatcccagcactttgggaggccaacgcgggcagattacctgagctcaggagttccagactaacctggccaacatggtgaaacccccgtccctactaaaaatgcaaaaattagccacgcatggtggcacatgcctgtaatcccagctactggggaggctgaggcaggagaattgcttgaacccaggagacagaggttgcagtgagccgagattgtgccactgaactccagcttggccgacagagtgagactctgtctcaaaaaaaaaaaaaattattgaaatgtacacattaagtgggtgaattttatctcaataaaactgttaaataaaataacaagaatatgaaaaactcttgaatactactcatccagactctccagctgttaacattctaccacatcggcttgctctctcttgcccccacttgctctttctctcggagcccttggagaggggtatgcaaatatccgtactctaaatatcctccatatactgtgtatttcctaaaatcaacaaggacattaggctgcacagccagagaacaaccatcaaaatcaggttaatattgatccaaatccatctatcaacagaagcaacatcaagttcaagacccttttgaaagcaatgataccagccatttactccatccctaaaggactgagggtgctgcgaatttaaccgtatcaatgcagtctttttgatgttatttactgaaggaaatggatgttctttaaaatatgtatttatttatttttcttttttgagacggaatcttgttctgtcgcccaggctggagggcagtgggacaatcttggttcactgcaacctctgcctcctgggttcaagaggttctcctgcctcagcctcccgagtagctgggattacaggcgcgaaccaccacgcccggttaattttggtatttttagtagaggcggggttttaccatgttggccaggctggtctcaaactcctgacatggtagcctgtaatcccagctactcgggaggctgaggcaggagaatcgcttgaacccaggaggtggggttgcagtgagccaagatcgtgccattgcactccagcctgggagacagagcgagactccatcaaaaaaaaaaaaaaaaaaaattcctgaagctcctcttgagcttacattctagtggactgtaaacagaaacatttttttttcctgtggataaagaaaagcagggcaagtaggggcttagacagaggaggggaggattcagattttaaatgggttggccactgtaggtctattaacgtggtgacatttgagggagtggcaatactagggaaggggcttcaggggagtggccaggagctagggatagagggagggaggacaggaggccttgtctgtcttttcctccatatgtaagtttcaggagtgagtggggggtgtcgagggtgctgtgctctccggcctgagcctcaggaaggaagggcagtagtcagggatgccagggaaggacagtggagtaggctttgtggggaacttcacggttccattgttgagatgatttgctggagacacacagatgaggacatcaaatacatccctggatcaggccctggggcctgagtccggaagagaggtctgtatggacacacccatcaatgggagcaccaggacacagatggaggctaatgtcatgttgtagacaggatgggtgctgagctgccacacccacattattagaaaataacagcacaggcttggggtggaggcgggacacaagactagccagaaggagaaagaaaggtgaaaagctgttggtgcaaggaagctcttggtatttccaatggcttgggcacaggctgtgagggtgcctgggacggcttgtggggcacaggctgcaagaggtgcccaggacggcttgtggggcacaggttgtgagaggtgccctggacggcttgtggggcacaggctgtgagaggtgcccaggacggcttgtggggcacaggctgtgagggtgcccgggacggcttgtggggcacaggttgtgagaggtgcccgggacggcttgtggggcacaggtttcagaggtgcccgggacggcttgtggggcacaggttgtgagaggtgcccgggacggcttgtgggacacaggttgtgagaggtgcctgggacggcttgtggggcacaggctgtgagggtgcctgggacggcttgtggggcacaggttgtgagaggtgcccgggtcggcttgtggggcacaggttgtgagaggtgcccgggacggcttgtggggcacaggttgtgagacgtgcccgggacggcttgtggggcacaggctgtgagggtgcccgggtcggcttgtggggcacaggctgcaagaggtgcccgggacggcttgtggggcacaggctgtgagggtgcccgggacggcttgtggggcacaggctgtgagggtgcccgggacagctcgtggggcacaggttgtgagaggtgcccgggacggcttgtggggcacaggctgtgagggtgcctgggacggcttgtggggcacaggttgtgagaggtgcccgggacggcttgtggggcacaggttgtgaggatgcccgggatggcttgtggggcacaggttgtgagaggtgcctgggacggcttgtggggcacaggctgtgagggtgcccgggacggcttgtggggcacaggctgtgagaggtgcctgggacggcttgtggggcacaggctgtgaggatgcccgggacggcttgtggggcacaggttgtgaggggtgcccaggacggcttgtggggcacaggctgcaagaggtgcccaggacggcttgtggggcacaggttgtgagaggtgcccgggacggcttgtggggcacaggctgtgagggagcccggcacggcttgcagctacagggagaaaagacttggtgctgtgggcctgccttggggctggtggtacagcccttatctgctgccctcaggatctcccggcccctctcgtccaggcccctgcaaccccatgccccagcctctgaggaccaaaggcgcccctgcttgggaagagggggctcaggggagtcgcctgacccggttccaagccaggctgatttaccgttgctaacatcctatcgcacgcatccctctgcctcatgcacccaaccccaaggcctggtacactgcaggccccaaggtcctgtgcgtcctttcaataccctcctcacctgcctcacctgccccccctaccctgactctggctggagaccccctccagggagttttcaaaacaaagggtgtcagtctcctgtgggattccctcacctctgcagcctgcggtctgaaagctgccccatggtgtgtagtgctaaacttccaacttactccaggccagcggtgacagcccgagggcaggaagggcacccacactgagcctcaaacagctaattttgcaactgtaagtccatataattgtcttgaaaagtaatttgtttcaaaaagctaaaaaacgaatactcttgagtctccttctagtaattccccttctagaggtctatcaccaggaaaagatccaaagcactgatattcttcatggagttgtttataatagaaaaaaactagagcttgttcacaaaggggagctctgcaggctgaagatgttgcacctgtcagcggggatgggggcacgcttgctgacgcagcaacggaaaagcatcagtgtgtgaagatgcattttctctctttctattattattatttttatttttattttttctgaggcagaacctcgctctgtcacccaggctggagtgcagtgatgcgacctcatcacaaccacgagccaccatgtgcggccccatgagcaagccaccacgcccagcctttttttcccttgttttaaaaaatcctctatttaaaaaagatgtgcatgggccgggcacggtggttcacgctcataatcccagctctttcagaggccgaggcaggcagatcacctgaggtcaagagttcgacaccagcctggccaacatggtgaaattccatctgtactaaaaatacaaaaattagccaggccgtggtggtgtgtgcctgtaatcccagctactcaggagactgaagcaggagaatcacttgaacccaggaggcagaggttgcagtgggtcaaaatcatgccaccacactccagtctgggagacagagcaagactccatctcagaaacaaactaacaaacaaaatttttatatctacctataattcgtataaatttaaaatacatgcataaaatcataccctttgcaagcacacgtactaactaaaaggaatatattcagcacatagaaatggttgtctaacggaggaggggggagttaataaacagagaggataaaaagaaataaatcagtagagctggaggagggtctcctccaggctgcgatgagaacatagtgagcagaattgcaggcctgcatgacctcaccttctgtgaggagtccggcctcccaagacgctttcctgcctaggtgcccggctcagagtgtcccctacaaggctactggaggagaaccccagaccgagcctcattcaggtgagggggctgcacaccggaggtgggagaggtctgtcccttcccaccctgtgacactgggtcccactttctctctagggggtctcggtttcctcatttgcaaactggagctcataaggtgggccagagaagtttcagtgaagtgaggaatggatcgtccctctgccagggcccatgtgctctaggtcaccctgtcatcacagggacagggaggtcaaggacagtcactcctgaggccagtccgggctgggctgaccacgtggactctcatgcccagattggggccccaatctccctgaagctggggctccagctgtgactcaggggtgggcagaaggggagacagaagcgataggttcctcagcccccagtcccacctgagggcccctttgtcactggatctgataagaaacaccacccctgcagccccctcccctcacctgaccaatggccacagcctggctgggcccagctccctgtatataaggggaccctgggggctgagcactaccaaggccagtcctgagcaggcccaactccagtgcagccgcccaccctgccgccatgtctctgaccaagacttaggggaccatcattgtgtccatgtgggccaagatctccacgcaggccgacaccatcggcaccgagactctggagaggtgagtgtcagatgggactgccagagggactgggtgggaggccaggtatgtgagtggggacagtggggagcgggcagtggggaggggaccgtggggaggggacagtgagtaggagacagtggggagaggacagtggagaggggacagtgaggaggggaccatgggaaggggaccgtggagtggggacagtgaggaggggaccatagggaggggacagtggggaggggacagtgaggaggggaccgtggggaggggacagtgaggaggggaccgtggggaggagacagtgaggaggggaccgtagggaggggacagtgaggaggggaccgtggggaggggacagtgaggaggggaccgtggggaggggacagtgaggaggggaccgtgggaaggagacagtgaggaggggaccttggggaggggacagtgaggaggggaccatggggaggggacagtgaggaggggacaatggagaggggacagtgaggaggggactgtggggagaggacagtgaggaggggaccatggggagggcacagtggggaggggagagtgaggaagggacagtgaggaggggactgtggggaggggacagtggagacagatagccttccctctcagtgaggagggcagggtaaggagggaacgattaggagttgcacaaccatctgggctcgctgagacctgggcaggcacaggcccaggttctgacaagcagagggtgaaaggtttcgttctaggcctgaagggccttacagggcagccagggcactacagcctctaaagtcccagcatctgggatcagggcactgtcccagcttcaaattcccagcatctgatcccctgggaggggccagggagcttttccttccctggaacgctgctgggaggtcatgagcctgcagaaggggtggcgggcaacccagtctggggctgggagggaggtcctgtggccagaggagacggtggaggggctgggggcaccaggcgtgctggaggcggagggcgggagatttggggaccaggctgcacagaacccgtcggaagcagggcgatcagccgggagctgcagaggcctggggggcctctagcccagggcagcctgggaggggcagctgcctgggcacccgggccccgcgaggaggggctggggcctgctgcggggtcgcagatgtgtcccggtgctcggagagggccgcagggcgcgtgggccgtggcgggaggccgcgctgctgggagctcacggcccccgccccccgtcccaggctcttcctcagccacccgcagaccaagacctacttcccgcacttcgacctgcacccggggtccgcgcagttgcgcgcgcacggctccaaggtggtggccgccgtgggcgacgcggtgaagagcatcgacgacatcggcggcgccctgtccaagctgagcgagctgcacgcctacatcctgcgcgtggacccggtcaacttcaaggtgcgcggggcgcggtgcgggcggggcggggcggggccgcggggcgggcggggccgcggggcggggtcgcggggcggggcggggtggggtcgcggggcggggcggggtcgcggggcggggcggggcggggcggggcgggcggggcggccggggcccggcggggcggggcggggcggggaggggctgggcggggcggggcgcggggcggggcgggccgggccggggcggggtcgcggggcggggtcgcggggcggggcgcggggcggggcggggcggggtggggtcgcggggcggggcccgggctaggccccgcccccgcactgagccgcccccgcccccagctcctgtcccactgcctgctggtcaccctggccgcgcgcttccccgccgacttcacggccgaggcccacgccgcctgggccaagttcctatcggtcgtatcctctgtcctgaccgagaagtaccgctgagcgccgcctccgggacccccaggacaggctgcggcccctcccctgcccttcaccctcccacagttcctgccctgactccaataaatggatgaggacggagcgatctgggctctgtgttctcagtattggagggaaggaggggagaagctgagtgatgggtccgggggcttcgcaggaactcggtcgtccccactgtcgtcgcggcctggggttcacttggggggcgccttggggaggttctagcccctgagcaccggagctgcggcccgggtggagcggagcagtcccgggccggcccgcggcgtctcctggggtccttgagtcggacgggcgtttgtgcgtctcccggcttcccatatcgcacaaagattgtcacttcactaagcgtattggaagcgtgtcggggctcagggaacttttccacaaagcctgacgtccgaatcccgggactctggcagctacgggggtccctgaggccggtccctccccgactcctaagagagtagggggtttcctgcccggtgttctctctccggttcctcccatgtgctccctcctggcagagcagtaactttacccgaggggagtaaacagatgcccctaaagtctgcagtaaaggtgcccacgcgcaacggcgtgggtcaatgccagaaaccctgggatcccggaggtcgaggcctccacacagacgggaacccgggctggttacgttccccggcgcaggccgagggtccccgcgttcccgccgcgctcgggccgataaggacgggcggggtgcccggaggctctataaggaggccagggcggcgggcgcggcccccagagcacgtcaggcggcgccatgctcagcgcccaggagcgcgcccaaatcgcgcaggtctgggacctgattgcgggccacgaggcgcaattcggggcggagctgctgctcaggtcggtagaggcggggtctccgggagctcagggaggtggagatgagggttttgggcgcgtgggccgccaacgccatccaaggtccttcgggtgcggatccccgggctctgggcggtgtgggcgctagtgaagccccacgcagccgccctcctccccggtcactgacctggtcctgcaggctcttcacggtgtaccccagcaccaaggtctacttcccgcacctgagcgcctgccaggacgcgacgcagctgctgagccacgggcagcgcatgctggcggctgtgggcgcggcggtgcagcacgtggacaacctgcgcgccgcgctgagcccgctggcggacctgcacgcgctcgtgctgcgcgtggacccagccaactttccggtgaggcctttccggccggggcaatggtgcagcgcgcagccggggtgggggggctctgggggtccctagcggggcagaccccgtctcaccggccccttctcctgcagctgctaatccagtgtttccacgtcgtgctggcctcccacctgcaggacgagttcaccgtgcaaatgcaagcggcgtgggacaagttcctgactggtgtggccgtggtgctgaccgaaaaataccgctgagccctgtgctgcgcaggccttggtctgtgcctgtcaataaacagaggcccgaaccatctgcccctgcctgtgtggtctttggggagctagcaaagcgaggtcactattgttggccagtgaagctcagggacctaaaaggagcctcctagaactctcaaatgcgccccacccccggaggtttgtcctcccatggcgaggagtgcgatggggcagagggagcactgtgatgtggcgggggtagggagggtggccttcgacttcaacccttgaatcgggcttccaaccatactgttcgcaaagcacttccccattcacgcatttattcattcattctccctccatccccacttcctgctgggacctgtagatgctaatcctggccctttttgcagagagatgcagaaactgaggtcccagagccaaatgtgcaacctaattcgttggcccagagcagagggctccgcagacctgttcctttccccttccttcccccatggacacttcctcagtggcaaacctgcgctagcctggttagccctccctgtgaccctgcagccctggggatgaggtcgggaggaagtcctcagtggccacaatttggcagacagagcaggtttagtcttccagcctgctcaatgacaagctgtgcgaccctgggcgtgtcccagagctctcaggcctttacctatcgaatagaaaaacaacgtccaactcacgagatttttgaaataatttttgaaatcataacacagggtgggtgcctgcagggtcgttgccaccccacccctccacccagccccagctgccgtgtctcaatctctgcaggtgcccaggccaaggcactcccttccccaggttccctcttctccctccccaggactgggaagggaatcttagggctccaccccaggcttttcagacaaagaataggggctgaggaaagagtgggaccttggaggtctccaaaccctgaatagggttggctctgggttggccatcctgggtctgtgtggggagcactggaccaggcctggcacccaggtctgacctggcagtcagcaacgaggtctgaagagagctgctggaagtggagccctgactgtgagtcggccaaactccccccagcagtcagtgccagtgacctgttgccctgcactgcctgggaccccagcccggtagtttggagaacttggccccacgttatctacatcccccaactgtttttttgtttttgggggttttttttttttttgctttgtttttgtttttgagataggcccttgctctgacaccccggctggagtgcagtggcacagttttggctcactgcagcctcaacctcctgggttcaagcgattctcctgcctctgtctcccgtgtagctgggattacaggcatgggccgccattcctggctaatttttgtatttttaatagagacacagtttcaccatgttgatcaggctggtctcaaactcctgacctcaagtgatctgccctcctcggtctcccaaagtgctgggatgacaggcgtgagccaccacacccagcccccgcaactgtttacatggataattaacagctttttgtcccaggcagagtttggtgtgaaagcagcttatgtttcactttggaaaaactgtgctcttctccccatccaggaagctgcctgggtctgggccatatgtggataccttatgggtataagctgctcaggaccctgtgtggaagctcaggacaatgccagcgggaaggctaccatgtggagagctggtctctgtttgggcaggactaagagacgcagggcagccttgggcaacctgtctactctcactcactcctcctcccctttcctgtgccaggcacctcctggcaacttgccagccaatgaccctgcatcccaggcataagagctcctactctcccccacctttcacttttgagcttacacagactcagaaataagctgccgtggtgctgtctcctgaggacaaggctaacaccaaggcggtctgggagaaagttggcaaccacactgctggctatgccacggaggccctggagaggcaagaaccctcctctccctgctcacaccttgggtccaacgcccactccagggctccactggccacccctaactattcttaccctggacccagcccccagcccctcactctttgcttccccctgaagcatgttcctgaccttcctctcacttggccctgagttatggctcagcccagatcaagaaacaatgcaagtaggtggccgacacgctgaccaatgccgtggtccacttagatgacatgcccaatgatgtgtctgagctgaggaagctgcatgtccacgagctgtgggtggacccaggcaacatcagggagagctttgggctgggaggaatctagggtgtgggggcagctggccttcctcataggacagaccctcccacgcgttcagggaggtggagcacaggtggcagtagtatctgcatcccctgactctctctccacagttcctgggtaaatgcctgctggtgacctaggcctgccacacccttcccagtttacccatgtggtgcctccatggacaaattatttgcttttgtgagtgctgtgttgacctaaaaacaccattaagctagagcattggtggtcatgccccctgcctgctgggcctcccaccaggccctcctcccctccctgccccagcacttcctgatctttgaatgaagtccgagtaggcagcagcctgtgtgtgcctgggttctctctgtcccggaatgtgccaacagtggaggtgtttacctgtctcagaccaaggacctctctgcagctgcatggggctggggagggagaactgcagggagtatgggaggggaagctgaggtgggcctgctcaagagaaggtgctgaaccatcccctgtcctgagaggtgccaggcctgcaggcagtggctcagaagctggggaggagagaggcatccagggttctactcagggagtcccagcatcgccaccctcctttgaaatctccctggttgaacccagttaacatacgctctccatcaaaacaaaacgaaacaaaacaaactagcaaaataggctgtccccaatgcaagtgcaggtgccagaacatttctctcattctcaccccttcctgccagagggtaggtggctggagtgagggtgctggccctactcacacttcctgtgtcatggtgaccctctgagagcagcccagtcagtggggaaggaggaaggggctgggatgctcacagccggcagcccacacctggggagactcttcagcagagcaccttgcggccttactcctgcacgtctcctgcagtttgtaaggtgcattcagaactcactgtgtgcccagccctgagctcccagctaattgccccacccagggcctctgggacctcctggtgcttctgcttcctgtgctgccagcaacttctggaaacgtccctgtccccggtgctgaagtcctggaatccatgctgggaagttgcacagcccatctggctctcagccagcctaggaacacgagcagcacttccagcccagcccctgccccacagcaagcctccccctccacactcacagtactgaattgagctttgggtagggtggagaggaccctgtcaccgcttttcttctggacatggacctctctgaattgttggggagttccctccccctctccaccacccactcttcctgtgcctcacagcccagagcattgttatttcaacagaaacactttaaaaaataaactaaaatccgacaggcacggtggctcacacctgtaatcccagtactttgggaggctgaggcgagaggatcacctgaggtcgggagtttgagaccagcctgaccaatatggagaaaccccagttatactaaaaatacaaaattagctgggtgtggtggcgcatgcctgtaatcctagctactaggaaggctgaggcaggagaatcgcttgaacccgggaggtggaggttgaggtgagctgagatcacgccattgcactccagcctgggcaacaagagcaaaactccgtctcaaaaaataaataaataaataaataaataaactaaaatctatccatgctttcacacacacacacacacacacacacacacacccttttttgtgttacttaaagtaggagagtgtctctctttcctgtctcctcacacccacccccagaagagaccaaaatgaagggtttggaactcagcccatgggccccatcccatgctgagggaacacagctacatctacaactactgccacaggctctctttttggacaaaaataccatcatactgtagatacctgtgtacaacttcctattctcagtgaagtgtctcccctgcatccctttcagccagttcattcagctctgcgccattccacagtctcactgattattactatgtttccatcatgatccccccaaaaaatcatgactttatttttttatttttattattattatttttttttttttttttgtgacggagtctcgctctgtcacccaggctggagtgcagtggcacaatctcggctcactgcaagctccacctcgcaggttcacgccattctcctccctcagcctcccgagtagctgagtagctgggactacaggcgccccccactacgcctggctaattttttctatttttaatagagacagagtttcactgcattagcgaggatggtctcgatctcctgacctcgcatctgcccgcctcagcctcccaatgtgctgggattacaggcgtgagccaccgcgcccggccttatgtatttatttttttgagacagagtctcgctgtgtcgtcaggctagagtgctgtggcacgatctcggctcactgcaacctccaactccctggttcaaaggattctccagcctccacctcccgagtagctgggattacaggcgtgcaccaccacacccagctaatttttgtatttttagtagagacggggtttctccatgttggtcagcctggtctcgaactcccgacctcagctgatccacccgccttggcctcccaaagtgctgggattacaggcgtgagccaccgagcctggccaaaccatcacttttcatgagcagggatgcacccactggcactcctgcacctcccaccctccccctcgccaagtccacccctt

SEQ ID NO: 247 - DNA, 576 bp, Homo sapiens
actcttctggtccccacagactcagagagaacccaccatggtgctgtctcctgccgacaagaccaacgtcaaggccgcctggggtaaggtcggcgcgcacgctggcgagtatggtgcggaggccctggagaggatgttcctgtccttccccaccaccaagacctacttcccgcacttcgacctgagccacggctctgcccaggttaagggccacggcaagaaggtggccgacgcgctgaccaacgccgtggcgcacgtggacgacatgcccaacgcgctgtccgccctgagcgacctgcacgcgcacaagcttcgggtggacccggtcaacttcaagctcctaagccactgcctgctggtgaccctggccgcccacctccccgccgagttcacccctgcggtgcacgcctccctggacaagttcctggcttctgtgagcaccgtgctgacctccaaataccgttaagctggagcctcggtagccgttcctcctgcccgctgggcctcccaacgggccctcctcccctccttgcaccggcccttcctggtctttgaataaagtctgagtgggcagca

SEQ ID NO: 248 - DNA, 32767 bp, Homo sapiens
  misc_feature (18415)..(18415): n is a, c, g, or t
  misc_feature (18835)..(18835): n is a, c, g, or t
  misc_feature (19063)..(19063): n is a, c, g, or t
gaattctaatctccctctcaaccctacagtcacccatttggtatattaaagatgtgttgtctactgtctagtatccctcaagtagtgtcaggaattagtcatttaaatagtctgcaagccaggagtggtggctcatgtctgtaattccagcactggagaggtagaagtgggaggactgcttgagctcaagagtttgatattatcctggacaacatagcaagacctcgtctctacttaaaaaaaaaaaaattagccaggcatgtgatgtacacctgtagtcccagctactcaggaggccgaaatgggaggatcccttgagctcaggaggtcaaggctgcagtgagacatgatcttgccactgcactccagcctggacagcagagtgaaaccttgcctcacgaaacagaatacaaaaacaaacaaacaaaaaactgctccgcaatgcgcttccttgatgctctaccacataggtctgggtactttgtacacattatctcattgctgttcgtaattgttagattaattttgtaatattgatattattcctagaaagctgaggcctcaagatgataacttttattttctggacttgtaatagctttctcttgtattcaccatgttgtaactttcttagagtagtaacaatataaagttattgtgagtttttgcaaacacagcaaacacaacgacccatatagacattgatgtgaaattgtctattgtcaatttatgggaaaacaagtatgtactttttctactaagccattgaaacaggaataacagaacaagattgaaagaatacattttccgaaattacttgagtattatacaaagacaagcacgtggacctgggaggagggttattgtccatgactggtgtgtggagacaaatgcaggtttataatagatgggatggcatctagcgcaatgactttgccatcacttttagagagctcttggggaccccagtacacaagaggggacgcagggtatatgtagacatctcattctttttcttagtgtgagaataagaatagccatgacctgagtttatagacaatgagcccttttctctctcccactcagcagctatgagatggcttgccctgcctctctactaggctgactcactccaaggcccagcaatgggcagggctctgtcagggctttgatagcactatctgcagagccagggccgagaaggggtggactccagagactctccctcccattcccgagcagggtttgcttatttatgcatttaaatgatatatttattttaaaagaaataacaggagactgcccagccctggctgtgacatggaaactatgtagaatattttgggttccatttttttttccttctttcagttagaggaaaaggggctcactgcacatacactagacagaaagtcaggagctttgaatccaagcctgatcatttccatgtcatactgagaaagtccccacccttctctgagcctcagtttctctttttataagtaggagtctggagtaaatgatttccaatggctctcatttcaatacaaaatttccgtttattaaatgcatgagcttctgttactccaagactgagaaggaaattgaacctgagactcattgactggcaagatgtccccagaggctctcattcagcaataaaattctcaccttcacccaggcccactgagtgtcagatttgcatgcactagttcacgtgtgtaaaaaggaggatgcttctttcctttgtattctcacatacctttaggaaagaacttagcacccttcccacacagccatcccaataactcatttcagtgactcaacccttgactttataaaagtcttgggcagtatagagcagagattaagagtacagatgctggagccagaccacctgagtgattagtgactcagtttctcttagtaattgtatgactcagtttcttcatctgtaaaatggagggttttttaattagtttgtttttgagaaagggtctcactctgtcacccaaatgggagtgtagtggcaaaatctcggctcactgcaacttgcacttcccaggctcaagcggtcctcccacctcaacatcctgagtagctggaaccacaggtacacaccaccatacctcgctaattttttgtatttttggtagagatggggtttcacatgttacacaggatggtctcagactccggagctcaagcaatctgcccacctcagccttccaaagtgctgggattataagcatgattacaggagttttaacaggctcataagattgttctgcagcccgagtgagttaatacatgcaaagagtttaaagcagtgacttataaatgctaactactctagaaatgtttgctagtattttttgtttaactgcaatcattcttgctgcaggtgaaaactagtgttctgtactttatgcccattcatctttaactgtaataataaaaataactgacatttattgaaggctatcagagactgtaattagtgctttgcataattaatcatatttaatactcttggattctttcaggtagatactattattatccccattttactacagttaaaaaaactacctctcaacttgctcaagcatacactctcacacacacaaacataaactactagcaaatagtagaattgagatttggtcctaattatgtctttgctcactatccaataaatatttattgacatgtacttcttggcagtctgtatgctggatgctggggatacaaagatgtttaaatttaagctccagtctctgcttccaaaggcctcccaggccaagttatccattcagaaagcattttttactctttgcattccactgtttttcctaagtgactaaaaaattacactttattcgtctgtgtcctgctctgggatgatagtctgactttcctaacctgagcctaacatccctgacatcaggaaagactacaccatgtggagaaggggtggtggttttgattgctgctgtcttcagttagatggttaactttgtgaagttgaaaactgtggctctctggttgactgttagagttctggcacttgtcactatgcctattatttaacaaatgcatgaatgcttcagaatatgggaatattatcttctggaatagggaatcaagttatattatgtaacccaggattagaagattcttctgtgtgtaagaatttcataaacattaagctgtctagcaaaagcaagggcttggaaaatctgtgagctcctcaccatatagaaagcttttaacccatcattgaataaatccctataggggatttctaccctgagcaaaaggctggtcttgattaattcccaaactcatatagctctgagaaagtctatgctgttaacgttttcttgtctgctaccccatcatatgcacaacaataaatgcaggcctaggcatgactgaaggctctctcataattcttggttgcatgaatcagattatcaacagaaatgttgagacaaactatggggaagcagggtatgaaagagctctgaatgaaatggaaaccgcaatgcttcctgcccattcagggctccagcatgtagaaatctggggctttgtgaagactggcttaaaatcagaagccccattggataagagtagggaagaacctagagcctacgctgagcaggtttccttcatgtgacagggagcctcctgccccgaacttccagggatcctctcttaagtgtttcctgctggaatctcctcacttctatctggaaatggtttctccacagtccagcccctggctagttgaaagagttacccatgcagaggccctcctagcatccagagactagtgcttagattcctactttcagcgttggacaacctggatccacttgcccagtgttcttccttagttcctaccttcgaccttgatcctcctttatcttcctgaaccctgctgagatgatctatgtggggagaatggcttctttgagaaacatcttcttcgttagtggcctgcccctcattcccactttaatatccagaatcactataagaagaatataataagaggaataactcttattataggtaagggaaaattaagaggcatacgtgatgggatgagtaagagaggagagggaaggattaatggatgataaaatctactactatttgttgagaccttttatagtctaatcaattttgctattgttttccatcctcacgctaactccataaaaaaacactattattatctttattttgccatgacaagactgagctcagaagagtcaagcatttgcctaaggtcggacatgtcagaggcagtgccagacctatgtgagactctgcagctactgctcatgggccctgtgctgcactgatgaggaggatcagatggatggggcaatgaagcaaaggaatcattctgtggataaaggagacagccatgaagaagtctatgactgtaaatttgggagcaggagtctctaaggacttggatttcaaggaattttgactcagcaaacacaagaccctcacggtgactttgcgagctggtgtgccagatgtgtctatcagaggttccagggagggtggggtggggtcagggctggccaccagctatcagggcccagatgggttataggctggcaggctcagataggtggttaggtcaggttggtggtgctgggtggagtccatgactcccaggagccaggagagatagaccatgagtagagggcagacatgggaaaggtgggggaggcacagcatagcagcatttttcattctactactacatgggactgctcccctatacccccagctaggggcaagtgccttgactcctatgttttcaggatcatcatctataaagtaagagtaataattgtgtctatctcatagggttattatgaggatcaaaggagatgcacactctctggaccagtggcctaacagttcaggacagagctatgggcttcctatgtatgggtcagtggtctcaatgtagcaggcaagttccagaagatagcatcaaccactgttagagatatactgccagtctcagagcctgatgttaatttagcaatgggctgggaccctcctccagtagaaccttctaaccagctgctgcagtcaaagtcgaatgcagctggttagactttttttaatgaaagcttagctttcattaaagattaagctcctaagcagggcacagatgaaattgtctaacagcaactttgccatctaaaaaaatctgacttcactggaaacatggaagcccaaggttctgaacatgagaaatttttaggaatctgcacaggagttgagagggaaacaagatggtgaagggactagaaaccacatgagagacacgaggaaatagtgtagatttaggctggaggtaaatgaaagagaagtgggaattaatacttactgaaatctttctatatgtcaggtgccattttatgatatttaataatctcattacatatggtaattctgtgagatatgtattattgaacatactataattaatactaatgataagtaacacctcttgagtacttagtatatgctagaatcaaatttaagtttatcatatgaggccgggcacggtggctcatatatgggattacatgcctgtaatcccagcactttgggaggccaaggcaattggatcacctgaggtcaggagttccagaccagcctggccaacatggtgaaaccccttctctactaaaaaatacaaaaaatcagccaggtgtggtggcacgcgtctataatcccagctactcaggaggctgaggcaggagaatcacttgaacccaggaggtggaggttgcagtgagctaagattgcaccactgcactccagcctaggcgacagagtgagactccatctcaaaaaaaaaaaaagaagtttattatatgaattaacttagttttactcacaccaatactcagaagtagattattacctcatttattgatgaggagcccaatgtacttgtagtgtagatcaacttattgaaagcacaagctaataagtagacaattagtaattagaagtcagatggtctgagctctcctactgtctacattacatgagctcttattaactggggactcgaaaatcaaagacatgaaataatttgtccaagcttacagaaccaccaagtagtaaggctaggatgtagacccagttctgctacctctgaagacagtgttttttccacagcaaaacacaaactcagatattgtggatgcgagaaattagaagtagatattcctgccctgtggcccttgcttcttacttttacttcttggcgattggaagttgtggtccaagccacagttgcagaccatacttcctcaaccataattgcatttcttcaggaaagtttgagggagaaaaaggtaaagaaaaatttagaaacaacttcagaataaagagattttctcttgggttacagagattgtcatatgacaaattataagcagacacttgagaaaactgaaggcccatgcctgcccaaattaccctttgaccccttggtcaagctgcaactttggttaaagggagtgtttatgtgttatagtgttcatttactcttctggtctaacccattggctccgtcttcatcctgcagtgacctcagtgcctcagaaacatacatatgtttgtctagtttaagtttgtgtgaaattctaactagcgtcaagaactgagggccctaaactatgctaggaatagtgctgtggtgctgtgataggtacacaagaaatgagaagaaactgcagattctctgcatctccctttgccgggtctgacaacaaagtttccccaaattttaccaatgcaagccatttctccatatgctaactactttaaaatcatttggggcttcacattgtctttctcatctgtaaaaagaatggaagaactcattcctacagaactccctatgtcttccctgatgggctagagttcctctttctcaaaaattagccattattgtatttccttctaagccaaagctcagaggtcttgtattgcccagtgacatgcacactggtcaaaagtaggctaagtagaagggtactttcacaggaacagagagcaaaagaggtgggtgaatgagagggtaagtgagaaaagacaaatgagaagttacaacatgatggcttgttgtctaaatatctcctagggaattattgtgagaggtctgaatagtgttgtaaaataagctgaatctgctgcctaacattaacagtcaagaaatacctccgaataactgtacctccaattattctttaaggtagcatgcaactgtaatagttgcatgtatatatttatcataatactgtaacagaaaacacttactgaatatatactgtgtccctagttctttacacaataaactaatctcatcctcataattctattagctaatacatattatcatcctatatttcagagacttcaagaagttaagcaacttgctcaagatcatctaagaagtaggtggtatttctgggctcatttggcccctcctaatctctcatggcaacatggctgcctaaagtgttgattgccttaattcatcagggatgggctcatactcactgcagaccttaactggcatcctcttttcttatgtgatctgcctgaccctagtagaacttatgaaatttctgatgagaaaggagagaggagaaaggcagagctgactgtgatgagtgatgaaggtgccttctcatctgggtaccagtggggcctctaagactaagtcactctgtctcactgtgtcttagccagttccttacagcttgccctgatgggagatagagaatgggtatcctccaacaaaaaaataaattttcatttctcaaggtccaacttatgttttcttaatttttaaaaaaatcttgaccattctccactctctaaaataatccacagtgagagaaacattcttttcccccatcccataaatacctctattaaatatggaaaatctgggcatggtgtctcacacctgtaatcccagcactttgggaggctgaggtgggtggactgcttggagctcaggagttcaagaccatcttggacaacatggtgataccctgcctctacaaaaagtacaaaaattagcctggcatggtggtgtgcacctgtaatcccagctattagggtggctgaggcaggagaattgcttgaacccgggaggcggaggttgcagtgagctgagatcgtgccactgcactccagcctgggggacagagcacattataattaactgttattttttacttggactcttgtggggaataagatacatgttttattcttatttatgattcaagcactgaaaatagtgtttagcatccagcaggtgcttcaaaaccatttgctgaatgattactatactttttacaagctcagctccctctatcccttccagcatcctcatctctgattaaataagcttcagtttttccttagttcctgttacatttctgtgtgtctccattagtgacctcccatagtccaagcatgagcagttctggccaggcccctgtcggggtcagtgccccacccccgccttctggttctgtgtaaccttctaagcaaaccttctggctcaagcacagcaatgctgagtcatgatgagtcatgctgaggcttagggtgtgtgcccagatgttctcagcctagagtgatgactcctatctgggtccccagcaggatgcttacagggcagatggcaaaaaaaaggagaagctgaccacctgactaaaactccacctcaaacggcatcataaagaaaatggatgcctgagacagaatgtgacatattctagaatatattatttcctgaatatatatatatatatatatacacatatacgtatatatatatatatatatatatttgttgttatcaattgccatagaatgattagttattgtgaatcaaatatttatcttgcaggtggcctctatacctagaagcggcagaatcaggctttattaatacatgtgtatagatttttaggatctatacacatgtattaatatgaaacaaggatatggaagaggaaggcatgaaaacaggaaaagaaaacaaaccttgtttgccattttaaggcacccctggacagctaggtggcaaaaggcctgtgctgttagaggacacatgctcacatacggggtcagatctgacttggggtgctactgggaagctctcatcttaaggatacatctcaggccagtcttggtgcattaggaagatgtaggcaactctgatcctgagaggaaagaaacattcctccaggagagctaaaagggttcacctgtgtgggtaactgtgaaggactacaagaggatgaaaaacaatgacagacagacataatgcttgtgggagaaaaaacaggaggtcaaggggatagagaaggcttccagaagaatggctttgaagctggcttctgtaggagttcacagtggcaaagatgtttcagaaatgtgacatgacttaaggaactatacaaaaaggaacaaatttaaggagaggcagataaattagttcaacagacatgcaaggaattttcagatgaatgttatgtctccactgagcttcttgaggttagcagctgtgagggttttgcaggcccaggacccattacaggacctcacgtatacttgacactgttttttgtattcatttgtgaatgaatgacctcttgtcagtctactcggtttcgctgtgaatgaatgatgtcttgtcagcctacttggtttcgctaagagcacagagagaagatttagtgatgctatgtaaaaacttcctttttggttcaagtgtatgtttgtgatagaaatgaagacaggctacatgatgcatatctaacataaacacaaacattaagaaaggaaatcaacctgaagagtatttatacagataacaaaatacagagagtgagttaaatgtgtaataactgtggcacaggctggaatatgagccatttaaatcacaaattaattagaaaaaaaacagtggggaaaaaattccatggatgggtctagaaagactagcattgttttaggttgagtggcagtgtttaaagggtgatatcagactaaacttgaaatatgtggctaaataactagaatactctttattttttcgtatcatgaatagcagatatagcttgatggccccatgcttggtttaacatccttgctgttcctgacatgaaatccttaatttttgacaaaggggctattcattttcattttatattgggcctagaaattatgtagatggtcctgaggaaaagtttatagcttgtctatttctctctctaacatagttgtcagcacaatgcctaggctataggaagtactcaaagcttgttaaattgaattctatccttcttattcaattctacacatggaggaaaaactcatcagggatggaggcacgcctctaaggaaggcaggtgtggctctgcagtgtgattgggtacttgcaggacgaagggtggggtgggagtggctaaccttccattcctagtgcagaggtcacagcctaaacatcaaattccttgaggtgcggtggctcactcctgtaatcacagcagtttgggacgccaaggtgggcagatcacttgaggtcaggagttggacaccagcccagccaacatagtgaaacctggtctctgcttaaaaatataaaaattagctggacgtggtgacgggagcctgtaatccaactacttgggaggctgaggcaggagaatcgcttgaaccggggaggtggagtttgcactgagcagagatcatgccattgcactccagcctccagagcgagactctgtctaaagaaaaacgaaaacaaacaaacaaacaaacaaacaaaacccatcaaattccctgaccgaacagaattctgtctgattgttctctgacttatctaccattttccctccttaaagaaactgtggaacttccttcagctagaggggcctggctcagaagcctctggtcagcatccaagaaatacttgatgtcactttggctaaaggtatgatgtgtagacaagctccagagatggtttctcatttccatatccacccacccagctttccaattttaaagccaattctgaggtagagactgtgatgaacaaacaccttgacaaaattcaacccaaagactcactttgcctagcttcaaaatccttactctgacatatactcacagccagaaattagcatgcactagagtgtgcatgagtgcaacacacacacacaccaattccatattctctgtcagaaaatcctgttggtttttcgtgaaaggatgttttcagaggctgaccccttgccttcacctccaatgctaccactctggtctaagtcactgtcaccaccacctaaattatagctgttgactcataacaatcttcctgcttctaccactgccccactacaatttcttcccaatatactatccaaattagtcttttcaaaatgtaagtcatatatggtcacctctttgttcaaagtcttctgatagtttcctatatcatttataataaaaccaaatccttacaattctctacaatagttgttcatgcatatattatgtttattacagatacgcatatatatagctctcatataaataaatatatatatttatgtgtatgtgtgtagagtgttttttcttacaactctatgatgtaggtattattagtgtcccaaattttataatttaggacttctatgatctcatcttttattctccccttcaccgaatctcatcctacattggccttattgatattccttgaaaattctaagcatcttacatctttagggtatttacatttgccattccctatgccctaaatatttaatcatagtttcatataaatgggttcctcatcatctatgggtactctctcaggtgttaactttatagtgaggactttcctgccatactacttaaagtagcgataccctttcaccctgtcctaatcacactctggccttcatttcagttttttttttttctccatagcacctaatctcattggtatataacatgtttcatttgcttatttaatgtcaagctctttccactatcaagtccatgaaaacaggaactttattcctctattctgtttttgtgctgtattcttagcaattttacaattttgaatgaaatgaatgagcagtcaaacacatatacaactataattaaaaggatgtatgctgacacatccactgctatgcacacacaaagaaatcagtggagtagagctggaagcgctaagcctgcatagagctagttagccctccgcaggcagagccttgatgggattactgagttctagaattggactcatttgttttgtaggctgagatttgctcttgaaaacttgttctgaccaaaataaaaggctcaaaagatgaatatcgaaaccagggtgttttttacactggaatttataactagagcactcatgtttatgtaagcaattaattgtttcatcagtcaggtaaaagtaaagaaaaactgtgccaaggcaggtagcctaatgcaatatgccactaaagtaaacattattccataggtgtcagatatggcttattcatccatcttcatgggaaggatggccttggcctggacatcagtgttatgtgaggttcaaaacacctctaggctataaggcaacagagctccttttttttttttctgtgctttcctggctgtccaaatctctaatgataagcatacttctattcaatgagaatattctgtaagattatagttaagaattgtgggagccattccgtctcttatagttaaatttgagcttcttttatgatcactgtttttttaatatgctttaagttctggggtacatgtgccatggtggtttgctgcacccatcaacccgtcatctacattaggtatttctcctaatgctatccttcccctagccccccacccccaacaggccccagtgtgtgatgttcccctccctgtgtccatggatcactggttttttttttttttttttttttttttttaaagtctcagttaaatttttggaatgtaatttattttcctggtatcctaggacctgcaagttatctggtcactttagccctcacgttttgatgataatcacatatttgtaaacacaacacacacacacacacacacacacatatatatatataaaacatatatatacataaacacacataacatatttatcgggcatttctgagcaactaactcatgcaggactctcaaacactaacctatagccttttctatgtatctacttgtgtagaaaccaagcgtggggactgagaaggcaatagcaggagcattctgactctcactgcctttggctaggtccctccctcatcacagctcagcatagtccgagctcttatctatatccacacacagtttctgacgctgcccagctatcaccatcccaagtctaaagaaaaaaataatgggtttgcccatctctgttgattagaaaacaaaacaaaataaaataagcccctaagctcccagaaaacatgactaaaccagcaagaagaagaaaatacaataggtatatgaggagactggtgacactagtgtctgaatgaggcttgagtacagaaaagaggctctagcagcatagtggtttagaggagatgtttctttccttcacagatgccttagcctcaataagcttgcggttgtggaagtttactttcagaacaaactcctgtggggctagaattattgatggctaaaagaagcccgggggagggaaaaatcattcagcatcctcacccttagtgacacaaaacagagggggcctggttttccatatttcctcatgatggatgatctcgttaatgaaggtggtctgacgagatcattgcttcttccatttaagccttgctcacttgccaatcctcagttttaaccttctccagagaaatacacattttttattcaggaaacatactatgttatagtttcaatactaaataatcaaagtactgaagatagcatgcataggcaagaaaaagtccttagctttatgttgctgttgtttcagaatttaaaaaagatcaccaagtcaaggacttctcagttctagcactagaggtggaatcttagcatataatcagaggtttttcaaaatttctagacatgagattcaaagccctgcacttaaaatagtctcatttgaattaactctttatataaattgaaagcacattctgaactacttcagagtattgttttatttctatgttcttagttcataaatacattaggcaatgcaatttaattaaaaaaacccaagaatttcttagaattttaatcatgaaaataaatgaaggcatctttacttactcaaggtcccaaaaggtcaaagaaaccaggaaagtaaagctatatttcagcggaaaatgggatatttatgagttttctaagttgacagactcaagttttaaccttcagtgcccatgatgtaggaaagtgtggcataactggctgattctggctttctactcctttttcccattaaagatccctcctgcttaattaacattcacaagtaactctggttgtactttaggcacagtggctcccgaggtcagtcacacaataggatgtctgtgctccaagttgccagagagagagattactcttgagaatgagcctcagccctggctcaaactcacctgcaaacttcgtgagagatgaggcagaggtacactacgaaagcaacagttagaagctaaatgatgagaacacatggactcatagagggaaacaacgcatactggggcctatcagagggtggagggtgagagaaggagaggatcaggaaaaatcactaatggatgctaagcgtaatacctgagtgatgagatcatctatacaacaaacccccttgacattcatttatctatgtaacaaacctgcacatcctgtacacgtacccctgaacttaaaataaaagttgaaaacaagaaagcaacagtttgaacacttgttatggtctattctctcattctttacaattacactagaaaatagccacaggctcctgcaaggcagccacagaatttatgacttgtgatatccaagtcattcctggataatgcaaaatctaacacaaaatctagtagaatcatttgcttacatctatttttgttctgagaatatagatttagatacataatggaagcagaataatttaaaatctggctaatttagaatcctaagcagctcttttcctatcagtggtttacaagccttgtttatatttttcctattttaaaaataaaaataaagtaagttatttgtggtaaagaatattcattaaagtatttatttcttagataataccatgaaaaacattcagtgaagtgaagggcctactttacccaacaagaatctaatttatataatttttcatactaatagcatctaagaacagtacaatatttgactcttcaggttaaacatatgtcataaattagccagaaagatttaagaaaatattggatgtttccttgtttaaattaggcatcttacagtttttagaatcctgcatagaacttaagaaattacaaatgctaaagcaaacccaaacaggcaggaattaatcttcatcgaatttgggtgtttctttctaaaagtcctttatacttaaatgtcttaagacatacatagattttattttactaattttaattatacagacaataaatgaatattcttactgattactttttctgactgtctaatctttctgatctatcctggatggccataacacttatctctctgaactttgggcttttaatataggaaagaaaagcaataatccatttttcatggtatctcatatgataaacaaataaaatgcttaaaaatgagcaggtgaagcaatttatcttgaaccaacaagcatcgaagcaataatgagactgcccgcagcctacctgacttctgagtcaggatttataagccttgttactgagacacaaacctgggcctttcaatgctataacctttcttgaagctcctccctaccacctttagccataaggaaacatggaatgggtcagatccctggatgcaagccaggtctggaaccataggcagtaaggagagaagaaaatgtgggctctgcaactggctccgagggagcaggagagaatcaaccccatactctgaatctaagagaagactggtgtccatactctgaatgggaagaatgatgggattacccatagggcttgttttagggagaaacctgttctccaaactcttggccttgagatacctggtccttattccttggactttggcaatgtctgaccctcacattcaagttctgaggaagggccactgccttcatactgtggatctgtagcaaattccccctgaaaacccagagctgtatcttaattgtttaaaaaaattatattatctcaaggactgttcttctctgagtagccaagctcagcttggttcaagctacaagcagctgcgctgctttttgtctagtcattgttcttttatttcagtggatcaaatacgttctttccaaacctaggatcttgtcttcctggactatatattttatccacgaagtcttaatctggggtccacagaacactagggggctggtgaagtttatagaaaaaaaatctgtatttttacttacatgtaactgaaatttagcattttcttctactttgaatgcaaaggacaaactagaatgacatcatcagtacctattgcatagttataaagagaaaccacagatattttcatactacaccataggtattgcagatctttttgtttttgtttttgtttgagatggagtttcgctcttattgcccaggctggagtgcagtggcatgatttcggctcactgcaacctccccttcctgcattcaagcaattctcctgccttggcctccagagtagctggggattacaggcacctgccaccatgccagtctaatttttgtatttttagtagagaatgggtttcgccatgttggccaggctggtcttgaactcctgacctcagatgatctgcccgccttggcctcctgaagtgctgggattataggtgtgagccaccacgcctggcccattgcagatatttttaattcacatttatctgcatcactacttggatcttaaggtagctgcagacccaatcccagatctaatgctttcataaagaagcaaatataataaatactataccacaaatgtaatgtttgatgtctgataatgatatttcagtgtaattaaacttagcactccatgtatattatttgatgcaataaaaacatatttttttagcacttacagtctgccaaactggcctgtgacacaaaaaaagtttaggggaattcccctagttttgtctgtgttagccaatggttagaatatatgctcagaaagataccattggttaatagctaaaagaaaatggagtagaaattcagtggcctggaataataacaatttgggcagtcattaagtcaggtgaagacttctggaatcatgggagaaaagcaagggagacattcttacttgccacaagtgtttttttttttttttttttttatcacaaacataagaaaatataataaataacaaagtcaggttatagaagagagaaacgctcttagtaaacttggaatatggaatccccaaaggcacttgacttgggagacaggagccatactgctaagtgaaaaagacgaagaacctctagggcctgaacatacaggaaattgtaggaacagaaattcctagatctggtggggcaaggggagccataggagaaagaaatggtagaaatggatggagacggaggcagaggtgggcagatcatgaggtcaagagatcgagaccatcctggcaaacatggtgaaatcccgtctctactaaaaataaaaaaattagctgggcatggtggcatgcgcctgtagtcccagctgctcgggaggctgaggcaggagaatcgtttgaacccaggaggcgaaggttgcagtgagctgagatagtgccattgcactccagtctggcaacagagtgagactccgtctcaaaaaaaaaaaaaagaaagaaagaaaagaaaaagaaaaaagaaaaaataaatggatgtagaacaagccagaaggaggaactgggctggggcaatgagattatggtgatgtaagggacttttatagaattaacaatgctggaatttgtggaactctgcttctattattcccccaatcattacttctgtcacattgatagttaaataatttctgtgaatttattccttgantcccaaaatattgaggtaaataacaatggtattataaaagggcagattaagtgatatagcataagcaatattcttcaggcacatggatcgaattgaatacactgtaaatcccaacttccagtttcagctctaccaagtaaagagctagcaagtcatcaaaatggggacatacagaaaaaaaaaaggacactagaggaataatataccctgactcctagcctgattaatatatcgattcacttttactctgtttggtgacaaattctggctttaaataattttaggattttaggcttctcagctcccttcccagtgagaagtataagcaggacagcaggcaagcaagaagagagcccaaggcaatactcacaaagtagccagtgtcccctgtggtcatagagaaatggaaagagagaggantccccccttggagccactgggtggtaatcctttccgtccgttcctctctagggaatcaccccaaggtactgtactttgggattaaggctttagtcccactgtggactacttgctattctgttcagtttctgaaggaactatgtacggtttttgtctccctagagaaactaaggtacagaagttttgtttacaatgcactccttaagagagctagaactgggtgaagantcctggtttaaccagccttaatttcctttccctgggccccggtttggtcacgtcactgtcaccacctttaaggcaaatgttaaatgcgctttggctgaactttttcctattttgagatttgctcctttatatgaggctttcttggaaaaggagaatgggagagatggatatcattttggaagatgatgaagagggtaaaaaagggtacaaatggaaatttgtgttgcagatagtatgaggagccaacaaaaaagagcctcaggatccagcacacattatcacaaacttagtgtccatccatcactgctgaccctctccggacctgactccacccctgaggacacaggtcagccttgaccaatgacttttaagtaccatggagaacagggggccagaacttcggcagtaaagaataaaaggccagacagagaggcagcagcacatatctgcttccgacacagctgcaatcactagcaagctctcaggcctggcatcatggtgcattttactgctgaggagaaggctgccgtcactagcctgtggagcaagatgaatgtggaagaggctggaggtgaagccttgggcaggtaagcattggttctcaatgcatgggaatgaagggtgaatattaccctagcaagttgattgggaaagtcctcaagattttttgcatctctaattttgtatctgatatggtgtcatttcatagactcctcgttgtttacccctggacccagagattttttgacagctttggaaacctgtcgtctccctctgccatcctgggcaaccccaaggtcaaggcccatggcaagaaggtgctgacttcctttggagatgctattaaaaacatggacaacctcaagcccgcctttgctaagctgagtgagctgcactgtgacaagctgcatgtggatcctgagaacttcaaggtgagttcaggtgctggtgatgtgattttttggctttatattttgacattaattgaagctcataatcttattggaaagaccaacaaagatctcagaaatcatgggtcgagcttgatgttagaacagcagacttctagtgagcataaccaaaacttacatgattcagaactagtgacagtaaaggactactaacagcctgaattggcttaacttttcaggaaatcttgccagaacttgatgtgtttatcccagagaattgtattatagaattgtagacttgtgaaagaagaatgaaatttggcttttggtagatgaaagtccatttcaaggaaatagaaatgccttattttatgtgggtcatgataattgaggtttagaagagatttttgcaaaaaaaataaaagatttgctcaaagaaaaataagacacattttctaaaatatgttaaatttcccatcagtattgtgaccaagtgaaggcttgtttccgaatttgttggggattttaaactcccgctgagaactcttgcagcactcacattctacatttacaaaaattagacaattgcttaaagaaaaacagggagagagggaacccaataatactggtaaaatggggaagggggtgagggtgtaggtaggtagaatgttgaatgtagggctcatagaataaaattgaacctaagctcatctgaattttttgggtgggcacaaaccttggaacagtttgaggtcagggttgtctaggaatgtaggtataaagccgtttttgtttgtttgtttgttttttcatcaagttgttttcggaaacttctactcaacatgcctgtgtgttattttgtcttttgcctaacagctcctgggtaacgtgatggtgattattctggctactcactttggcaaggagttcacccctgaagtgcaggctgcctggcagaagctggtgtctgctgtcgccattgccctggcccataagtaccactgagttctcttccagtttgcaggtcttcctgtgaccctgacaccctccttctgcacatggggactgggcttggccttgagagaaagccttctgtttaataaagtacattttcttcagtaatcaaaaattgcaattttatcttctccatcttttactcttgtgttaaaaggaaaaagtgttcatgggctgagggatggagagaaacataggaagaaccaagagcttccttaagaaatgtatgggggcttgtaaaattaatgtggatgttatgggagaattcccaagattcccaaggaggatgatatgatggagaaaaatctttatcggggtgggaaaatggttaattaagtggcagagactcctaggcagtttttactgcaccggggaaagaaggagctgttgtggtacctgagaaagcagatttgtggtacatgtcacttttcattaaaaacaaaaacaaaacaaaacaaaacttcatagatatccaagatataggctgagaattactattttaatttactcttatttacattttgaagtagctagcttgtcacatgttttatgaaattgatttggagataagatgagtgtgtatcaacaatagcctgctctttccatgaaggattccattatttcatgggttagctgaagctaagacacatgatatcattgtgcattatcttctgatacaatgtaacatgcactaaaataaagttagagttaggacctgagtgggaaagtttttggagagtgtgatgaagactttccgtgggagatagaatactaataaaggcttaaattctaaaaccagcaagctagggcttcgtgacttgcatgaaactggctctctggaagtagaagggagagtaagacatacgtagaggactaggaaagaccagatagtacagggcctggctacaaaaatacaagcttttactatgctattgcaatactaaacgataagcattaggatgttaagtgactcaggaaataagattttgggaaaaagtaatctgcttatgtgcacaaaatggattcaagtttgcagataaaataaaatatggatgatgattcaaggggacagatacaatggttcaaacccaagaggagcagtgagtctgtggaattttgaaggatggacaaaggtggggtgagaaagacatagtattcgacctgactgtgggagatgagaaggaagaaggaggtgataaatgactgaaagctcccagactggtgaagataacaggaggaaaccatgcacttgaccctggtgactctcatgtgtgaagggtagagggatattaacagatttactttttaggaagtgctagattggtcagggagttttgaccttcaggtcttgtgtctttcatatcaaggaacctttgcattttccaagttagagtgccatattttggcaaatataactttattagtaattttatagtgctctcacattgatcagactttttcctgtgaattacttttgaatttggctgtatatatccagaatatgggagagagacaaataattattgtagttgcaggctatcaacaatactggtctctctgagccttataacctttcaatatgccccataaacagagtaaacagggattattcatggcactaaatattttcacctaggtcagtcaacaaatggaggcaatgtgcattttttgatacatatttttatatatttatggggcatgtgatacttacatgcctagaacatgtgactgattaagtctagatatttaggatatccattactttgagcatttatcatttctatgtattgagaaaatttcaaatcctcatttctgaccattttgaaatatataataaatagtaattaactatagtcaccctactcaaatatcaacattataaactaactaatccttctttccacttttttaccaaccaacatctcttaaatcccctgccatacacatcacacatttttcagctctgataactatcattctactctcataccaccatgagaccacttttttagctccacagatgaataaaaacatgtgatatttgactttctgtatctggcttattttattatctatctctttggcataccaagagtttgtttttgttctgcttcagggctttcaattaacataatgacctctggttccatccatgttgctacaaatgacaagatttcattctttttcatggcaaaatagtactgtgcaaaaaatacaattttttaatccgttcatctgttgatagacacttaggttgatcccaaaccttaactattgtgaataggtgcttcaataaacatgagtgtaatgtgtccattggatatactgatttcctttcttttggataaataaccactagtgagattgctggattgtatgatagttctgtttttagtttattgagaaatcttcatactgttttccataatggttgtactattttacattcccaccaacagtgtgtaagaaagagttcccttttctccatatcctcacaaggatctgttattttttgtcttttttgttaatagcattttaactagagtaagtagatatctcattgtagttttgatttgcatttccctgatcattagtgatgttgagattttttcatatgtttgttggtcatttgtatatctttttctgagattgtctgttcatgtccttatcctacttttattgggattgttgttattttcttgataatcattgtgtcattttagagcctggatattattcttttgtcagatgtatagattgtgaagattttctcctctgtgggttgtctgtttattctgcagactcttccttttgccatgcaaaagctctttagtttaatttagtcccagatattttctttgtttttatgtgtttgcatttgtgttcttgtcatgaaatcctttcctaagccaatgtgtagaagggtttttccgatgttattttctagaattgttacagtttcaggcttagatttaagtccttgatccatcttaagttgatttttgtataaggtgagagatgaagatccagtttcattctcctacatgtagcttgccagctatcccgactcatttgttgaatagggtgccctttcccatttatgtttttgtttgctttgtcaaagatcagttcggatgtaagtatttgagtttatttctgggttctctattctgttccattggtccgatgtgcctatttgtacaccagcatcatgctgtgtttttggtgactatggccttattgtatagtttgaaatgaggtaatgtaatgccattcagatttgttcttttttttagacttgcttgtttattgggctcttttttggttccataagaattttaggattgttttttctagttctgtgaaggctaatggtggtatttatgggaattgcaatgcaatttgtaggttgcttctggcattatggccattttcacaatattgattctacccatctatgagaatggcatgtgtttccatttgtttgtgtcttatatgattactatcagccgtgttttgtagttttccttgtagatgtctttcacctccttggttaggtatatattcctaagtttttgttttgttttgttttgttttttgcagctattgtaaaaggggttgagttattgattttattctcatcttggtcattgctggtatgtaagaaagcaactcattggtgtacgttaattttgtatccagaaactttgctgaattattttatcagttctagggggttttggaggagtctttagagttttctacatacacaatcatatcatcagcaaacagtgacagtttgactttctctttaacaatttggatgtgctttacttgtttctcttgtctgattgctcttgctaggacttccagtaatatgttaaagagaagtggtgagagtgggtatccttgtctcattccagttttcagacagaatgcttttaactttttcccattcaatataatgttggctgtgtgtttaccatagctggcttttattacattgaggtatgtcctttgtaaaccgattttgctgagttttagtcataaagtgatgttgaattttgttgaatgcagtttctgtggctattgagataatcacatgatttttgtttccaattctctttatgttgtgtatcacacttattgacttgcgtatgttaaaccatccgtgcatccctcgcatgaaaccacttgatcatgggttttgatatgccgtgtgggatgctattagctatattttgtcaaggatgttggcatctatgttcatcagggatattgatctgtagtgttttttttttttggttatgttctttcccagttttggtattaaggtgatactggcttcatagaatgatttagggaggattctctctttctctatcttgtagaatactgtcaataggattggtatcaattcttctttgaatgtctggtagaattcgaacgtctcctttaggttttctagtttattcatgtaaaggtgttcatagtaaccttgaataatcttttgtatttctgtggtatcagtaatagtatctcctgttttgtttctaactgagtttatttgcacttctctcctcttttcttggttaatcttgctaatggtctatcagttttatttatcttttcaaagaaccagctttttatttcatttagcttttgtatttttttgcagttgttttaatttcatttagttctcctcttatcttagttattccctttcttttgctgggttttggttctgtttgtttttgtttctctagtttcttgtggtgtgaccttatattgtctgtcctctttcagactctttgacatcgacatttagggctgtgaactttccttttagcaccatctttgctgtatcctagaggttttgataggtgtgtcactattgtcggtcagttcaagtaattttgttgttcttattatactttaagttctgggatacatgtgcagaatgtgcaggtttgttacataggtatagatgtgccatggtggtttgctgctcccatcaacctgtcatctacattaggtatttcttttaatgttatccctctcctaaccccctcaccccccgacaggccctggtgtgtgatgttcccctccctgtgtccatgtgttctcattgttcaactcccacttatgagtgagaacgtgtggtgtttggtttctctgttcctgtgttagtttgctcagaatgatgtttccaccttcaccatgtccctgcaaagacatgaactcatcattttatggctgcatatattccatggtgtatatgtgccacattttctttatccattatatcgctgatggccatttgggttggttccaagtctttggtattgtgaatagtgccgcaataaacatacgtgtgcacatgtctttatagtagaatgatttctaattctttgggtatatacccagtaatgggattgctgggtcaaacagtatttctggttctagatccttgaggaattgccacactgtcttccacaatggttgaactaatttacacacccatcaacagtgtaaaatttttcctattcttccacatcctctccagcaccttttgtttcctgactttttaataattgccattctaactggcatgagatggtatctcattgtggttttgatttgcatttctctaatgaccagtgatgatgagcttcttttcatgtgtttcttggccacataaatgacttctttagagaagcatctgttcatatcctttgtccactttttgatggggtcgttaggttttttcttgtaaatttgttgaagttctttgtagattttggatgttagccctttgtcagatggatagattggcaaaaattttctcccattctgtaggttgcctgttcactctgatgatagtcttttgctgtgcagaagctctttagtttaattagatcccatatgtcaattttggcctttgttgtcattgcttttgatgtttagtcgtggaattttgcccatgcctatgtcctgaatggtattgcctaggttatcttctaggatttttatggttttaggttgcacatttaagtctttaatccaccttgagttaatttttgtataaggtgtaaggaaggggtacagtttcagttttatgcatattgctagccagtttttccagcaccatttattaaatagggaattctttctccattgcttttgtgatgtttgtcaaagatcagatggtcgtagatgtgtggcattatttctgaggcttctgttctgttccactggtctatatatctgttttggtaccagtaccatgctgtttttgttactgtagccttgtagtatagcttgaagtcaggtagcatcatgcctccagctttgttctttttgtttaggattgtcttggctatatgggctcttttttgattccatatgacatttaaagtagttttttctaattctttgaaaaaagtcagtggtagcttgatggggatagcattgaatctataaattactttgggcagtatggccattttaaagatattgattctttctatctatgagcatggaatgtttttccatttgtttgtgtcctctcttatttccttgagcagtgagtggtttgtagctctccttgaagaggttcttcacatcccttataagttgtatttctaggtattttattttattctctttgcagcaattgtgaatgggagttcacccatgatttggctctctgcttgtctattattggtgtataggaatgcttgtgatttttgcacactgattttgtatcttgagactttgctgaagctgtttatcagcttaagattttgggctgagatgacagggtcttctaaatatacaatcatgtcatctgcaaacagagacaatttgacttcctctcttcctatttgaatatgctttatttctttctcttgcctgattgtcctggcgagaacttccaatactatgttgagtaagagtggcgagagggcatccttgtcttgtgccggttttcaaagcaaatgatttttaaatttccgtcttgatttcattgttgacccaatgatcattcaggagcaggttatttaatttccctgtatttgcatggttttgaaggttccttttgtagttgatttccaattttattctactgtggtctgagagagtgcttgatataatttcaatttttaaaaatttattgaggcttgttttgtggcatatcatatggcctatcttggagaaagttccatgtgctgatgaatagaatgtgtattctgcagttgttgggtagaatgtcctgtaaatatctgttaagtccatttgttctttaaatccattgtttctttgtagactgtcttgatgacctgcctagtgcagtcagtggagtattgaagtcccccactattattatgttgctgtctagtagtaattgttttataaatttgggatctccagtattagatgcatatatattaagaattgtaatattctcccattggacaagggcttttatcattatatgatgtccctctttgtcttttttaactgctgtttctttaaagtttgttttgtctgacataagaatagctgctttggctcgcttttggtgtccatttgtgtggaatgtcattttccacccctttaccttaagtttatgtgagtccttatgtgttaggtgagtctcctgaaggcggcagataactggttggtgaattctattcattctgcaattctgtatcttttaagtggagcatttagtccatttacattcaacatcagtattgaggtgtgaggtgactattccattcttcgtggtatttgttgcctgtgtatctttttatctgtatttttgttgtatatgtcctatgggatttatgctttaaagaggttctgttttgatgtgcttccagggtttatttcaagatttagagctccttttatcattcttgtagtgttggcttggtagtgccgaattctctcagcatttgtttttctgaaaaacactgtgtattttcttcatttgtgaagcttagtttcactggatataaaattcttggctgataattgttttgtttaagaaggctgaagatagggccatattcacttctagcttttacggtttctgctgagaaatctgctgttaatctgataggttttctttcataggttacctggtagtttcacctcacagctcttaagattctctttgtctttagataactttggatactctgatgacaatgtacctaggcaatgatatttttgcaatgaatttcccaggtgtttattgagcttctttgtatttggatatctaggtctctagcaaggagggggaagttttccttgattatttccatggacaagttttccaaacttttagatttctcttctttctcaggaatgctgattattcttaggtttgattgtttaacataatcccagatttcttggaggctttgttcatattttcttattcttttttctttgtctttgttggattgggtaattcaaaaactttgtcttcaagctctgaatttcttctgcttggattctattgctgagactttctagagcattttgcatttctataagtgcatccattcatccattgtttcctgaagttttgaatgttttttatttatgctatctctttaactgaagatttctcccctcatttcttgtatcatatttttggtttttttaaaattggacttcaccttcctcggatgcctccttgattagcttaataactgaccttctgaattatttttcaggtaaatcagggatttcttcttggtttggatgcattgctggtgagctagtatgattttttggggggtgttaaagaaccttgtttttcatattaccagagttagttttctggttccttctcacttgggtaggctctgtcagagggaaagtctaggcctcaaggctgagacttttgtcccagcaggtgttcccttgatgtagcacagtcccccttttcctaggacgtggggcttcctgagagccgaactgtagtgattgttatctctcttctggatctagccacccatcaggtctaccagactccaggctggtactggggtttgtctgcacagagtcttgtgacgtgaaccatctgtgggtctctcagccatagatacaaccacctgctccaatggaggtggtagaggatgaaatgaactctgtgagggtccttacttttggttgttcaatgcactatctttttgtgctggttggcctcctgccaggaggtggcactttctagaaagcatcagcagaggcagtcaggtggtggtggctgggggggctggggcactagaactcccaagaatatatgccctttgtcttcagctactagggtgagtaaggaaggaccatcaggtgggggcaggactagtcgtgtctgagctcagagtctccttgggcaggtctttctgtggctactgtgggaggatgggggtgtagtttccaggtcaatggatttatgttcctaggacaattatggctgcctctgctgtgtcatgcaggtcatcaggaaagtgggggaaagcaagcagtcacgtgacttgcccagctcccatgcaactcaaaaggttggtctcacttccagcgtgcaccctcccccgcaacagctccgaatctgtttccatgcagtcagtgagcaaggctgagaacttgcccaggctaccagctgcgaaaccaagtagggctgtcctacttccctgccagtggagtctgcacaccaaattcatgtccccccaccaacccccccactgcccagcccctagatctggccaggtggagattttctttttcctgtctcttttcccagttcctctggcagccctcccaaatgacccctgtgaggcaaggcagaaatggcttcctaggggacccagagagcccacagggcttttcccgctgcttcctctacccctgtattttgcttggccctctaaattgactcagctccaggtaaggtcagaatcttctcctgtggtctagatcttcaggttcccagtgaggatgtgtgtttgggggtagacggtcccccttttccacttccacagtttgggcactcacaatatttggggtgtttcccgggtcctacatgagcaatctgcttctttcagagggtgtgtgcgttctctcagctttcttgaatttatttctgcaggtggttctgcaaaaaaaattcctgatgggagacttcacatgctgctctgtgcatccgagtgggagctgcaatgtacttctgctgccacccatctgccatcaccctctaatttgtcggtaatatgcatttttaatcaatctttttttctctctctctcttttcttctcccccaaaactatactgccctttgatatcaaggaatcaaggccgtgatgttgaggggtgggcagtggatacactctttaccccttagggagcatatctagatttagatattgccaattcaagataacttaattgaaagcaaattcataatgaatacacacacacacacacacatctgcatgacaagatttttaatagttgaaagaataactaataattgtccacaggcaataagggctttttaagcaaaacagttgtgataaaacaggtcattcttagaatagtaatccagccaatagtacaggttgcttagagattatgacattaccagagttaaaattcaataatggcttctcactccctaccactgaggacaagtttatgtccttaggtttatgcttccctgaaacaataccacctgctattctccactttacatatcaacggcactggttctttatctaactctctggcacagcaggagtttgttttcttctgcttcagagctttgaatttactatttcagcttctaaactttatttgcaatgccttcccatggcagactccttctgtcattttgcctctgttcgaaaactttttccttaatttcattcttagttaataatatctgaaattattttgttgtttaacttaattattaattttatgtatgttctacctagatataatcttctagaggattgttttattctctgacttatttaacttaaatgcccactacctttaaaaattatgacatttatttaacagatatttgctgaacaaatgtttgaaaatacatgggaaagaatgcttgaaaacacttgaaattgcttgtgtaaagaaacagttttatcagttaggatttaatcaatgtcagaagcaatgatataggaaaaatcgaggaataagacagttatggataaggagaaatcaacaaactcttaaaagatattgcctcaaaagcataagaggaaataagggtttatacatgacttttagaacactgcctgggtttttggataaatggggaagttgttggaaaacaggagggatcctagatattccttagtctgaggaggagcaattaagattcacttgtttagaggctgggagtggtggctcacgcctgtaatcccagaattttgggaggccaaggcaggcagatcacctgaggtcaagagttcaagaccaacctggccaacatggtgaaatcccatctctacaaaaatacaaaaattagacaggcatgatggcaagtgcctgtaatcccagctacttgggaggctgaggaaggagaattgcttgaacctggaaggcaggagttgcagtgagccgagatcataccactgcactccagcctgggtgacagaacaagactctgtctcaaaaaaaaaaaagagagattcaaaagattcacttgtttaggccttagcgggcttagacacc

SEQ ID NO: 249 - DNA, 32767 bp, Homo sapiens
gaattctaatctccctctcaaccctacagtcacccatttggtatattaaagatgtgttgtctactgtctagtatccctcaagtagtgtcaggaattagtcatttaaatagtctgcaagccaggagtggtggctcatgtctgtaattccagcactggagaggtagaagtgggaggactgcttgagctcaagagtttgatattatcctggacaacatagcaagacctcgtctctacttaaaaaaaaaaaaattagccaggcatgtgatgtacacctgtagtcccagctactcaggaggccgaaatgggaggatcccttgagctcaggaggtcaaggctgcagtgagacatgatcttgccactgcactccagcctggacagcagagtgaaaccttgcctcacgaaacagaatacaaaaacaaacaaacaaaaaactgctccgcaatgcgcttccttgatgctctaccacataggtctgggtactttgtacacattatctcattgctgttcgtaattgttagattaattttgtaatattgatattattcctagaaagctgaggcctcaagatgataacttttattttctggacttgtaatagctttctcttgtattcaccatgttgtaactttcttagagtagtaacaatataaagttattgtgagtttttgcaaacacagcaaacacaacgacccatatagacattgatgtgaaattgtctattgtcaatttatgggaaaacaagtatgtactttttctactaagccattgaaacaggaataacagaacaagattgaaagaatacattttccgaaattacttgagtattatacaaagacaagcacgtggacctgggaggagggttattgtccatgactggtgtgtggagacaaatgcaggtttataatagatgggatggcatctagcgcaatgactttgccatcacttttagagagctcttggggaccccagtacacaagaggggacgcagggtatatgtagacatctcattctttttcttagtgtgagaataagaatagccatgacctgagtttatagacaatgagcccttttctctctcccactcagcagctatgagatggcttgccctgcctctctactaggctgactcactccaaggcccagcaatgggcagggctctgtcagggctttgatagcactatctgcagagccagggccgagaaggggtggactccagagactctccctcccattcccgagcagggtttgcttatttatgcatttaaatgatatatttattttaaaagaaataacaggagactgcccagccctggctgtgacatggaaactatgtagaatattttgggttccatttttttttccttctttcagttagaggaaaaggggctcactgcacatacactagacagaaagtcaggagctttgaatccaagcctgatcatttccatgtcatactgagaaagtccccacccttctctgagcctcagtttctctttttataagtaggagtctggagtaaatgatttccaatggctctcatttcaatacaaaatttccgtttattaaatgcatgagcttctgttactccaagactgagaaggaaattgaacctgagactcattgactggcaagatgtccccagaggctctcattcagcaataaaattctcaccttcacccaggcccactgagtgtcagatttgcatgcactagttcacgtgtgtaaaaaggaggatgcttctttcctttgtattctcacatacctttaggaaagaacttagcacccttcccacacagccatcccaataactcatttcagtgactcaacccttgactttataaaagtcttgggcagtatagagcagagattaagagtacagatgctggagccagaccacctgagtgattagtgactcagtttctcttagtaattgtatgactcagtttcttcatctgtaaaatggagggttttttaattagtttgtttttgagaaagggtctcactctgtcacccaaatgggagtgtagtggcaaaatctcggctcactgcaacttgcacttcccaggctcaagcggtcctcccacctcaacatcctgagtagctggaaccacaggtacacaccaccatacctcgctaattttttgtatttttggtagagatggggtttcacatgttacacaggatggtctcagactccggagctcaagcaatctgcccacctcagccttccaaagtgctgggattataagcatgattacaggagttttaacaggctcataagattgttctgcagcccgagtgagttaatacatgcaaagagtttaaagcagtgacttataaatgctaactactctagaaatgtttgctagtattttttgtttaactgcaatcattcttgctgcaggtgaaaactagtgttctgtactttatgcccattcatctttaactgtaataataaaaataactgacatttattgaaggctatcagagactgtaattagtgctttgcataattaatcatatttaatactcttggattctttcaggtagatactattattatccccattttactacagttaaaaaaactacctctcaacttgctcaagcatacactctcacacacacaaacataaactactagcaaatagtagaattgagatttggtcctaattatgtctttgctcactatccaataaatatttattgacatgtacttcttggcagtctgtatgctggatgctggggatacaaagatgtttaaatttaagctccagtctctgcttccaaaggcctcccaggccaagttatccattcagaaagcattttttactctttgcattccactgtttttcctaagtgactaaaaaattacactttattcgtctgtgtcctgctctgggatgatagtctgactttcctaacctgagcctaacatccctgacatcaggaaagactacaccatgtggagaaggggtggtggttttgattgctgctgtcttcagttagatggttaactttgtgaagttgaaaactgtggctctctggttgactgttagagttctggcacttgtcactatgcctattatttaacaaatgcatgaatgcttcagaatatgggaatattatcttctggaatagggaatcaagttatattatgtaacccaggattagaagattcttctgtgtgtaagaatttcataaacattaagctgtctagcaaaagcaagggcttggaaaatctgtgagctcctcaccatatagaaagcttttaacccatcattgaataaatccctataggggatttctaccctgagcaaaaggctggtcttgattaattcccaaactcatatagctctgagaaagtctatgctgttaacgttttcttgtctgctaccccatcatatgcacaacaataaatgcaggcctaggcatgactgaaggctctctcataattcttggttgcatgaatcagattatcaacagaaatgttgagacaaactatggggaagcagggtatgaaagagctctgaatgaaatggaaaccgcaatgcttcctgcccattcagggctccagcatgtagaaatctggggctttgtgaagactggcttaaaatcagaagccccattggataagagtagggaagaacctagagcctacgctgagcaggtttccttcatgtgacagggagcctcctgccccgaacttccagggatcctctcttaagtgtttcctgctggaatctcctcacttctatctggaaatggtttctccacagtccagcccctggctagttgaaagagttacccatgcagaggccctcctagcatccagagactagtgcttagattcctactttcagcgttggacaacctggatccacttgcccagtgttcttccttagttcctaccttcgaccttgatcctcctttatcttcctgaaccctgctgagatgatctatgtggggagaatggcttctttgagaaacatcttcttcgttagtggcctgcccctcattcccactttaatatccagaatcactataagaagaatataataagaggaataactcttattataggtaagggaaaattaagaggcatacgtgatgggatgagtaagagaggagagggaaggattaatggatgataaaatctactactatttgttgagaccttttatagtctaatcaattttgctattgttttccatcctcacgctaactccataaaaaaacactattattatctttattttgccatgacaagactgagctcagaagagtcaagcatttgcctaaggtcggacatgtcagaggcagtgccagacctatgtgagactctgcagctactgctcatgggccctgtgctgcactgatgaggaggatcagatggatggggcaatgaagcaaaggaatcattctgtggataaaggagacagccatgaagaagtctatgactgtaaatttgggagcaggagtctctaaggacttggatttcaaggaattttgactcagcaaacacaagaccctcacggtgactttgcgagctggtgtgccagatgtgtctatcagaggttccagggagggtggggtggggtcagggctggccaccagctatcagggcccagatgggttataggctggcaggctcagataggtggttaggtcaggttggtggtgctgggtggagtccatgactcccaggagccaggagagatagaccatgagtagagggcagacatgggaaaggtgggggaggcacagcatagcagcatttttcattctactactacatgggactgctcccctatacccccagctaggggcaagtgccttgactcctatgttttcaggatcatcatctataaagtaagagtaataattgtgtctatctcatagggttattatgaggatcaaaggagatgcacactctctggaccagtggcctaacagttcaggacagagctatgggcttcctatgtatgggtcagtggtctcaatgtagcaggcaagttccagaagatagcatcaaccactgttagagatatactgccagtctcagagcctgatgttaatttagcaatgggctgggaccctcctccagtagaaccttctaaccagctgctgcagtcaaagtcgaatgcagctggttagactttttttaatgaaagcttagctttcattaaagattaagctcctaagcagggcacagatgaaattgtctaacagcaactttgccatctaaaaaaatctgacttcactggaaacatggaagcccaaggttctgaacatgagaaatttttaggaatctgcacaggagttgagagggaaacaagatggtgaagggactagaaaccacatgagagacacgaggaaatagtgtagatttaggctggaggtaaatgaaagagaagtgggaattaatacttactgaaatctttctatatgtcaggtgccattttatgatatttaataatctcattacatatggtaattctgtgagatatgtattattgaacatactataattaatactaatgataagtaacacctcttgagtacttagtatatgctagaatcaaatttaagtttatcatatgaggccgggcacggtggctcatatatgggattacatgcctgtaatcccagcactttgggaggccaaggcaattggatcacctgaggtcaggagttccagaccagcctggccaacatggtgaaaccccttctctactaaaaaatacaaaaaatcagccaggtgtggtggcacgcgtctataatcccagctactcaggaggctgaggcaggagaatcacttgaacccaggaggtggaggttgcagtgagctaagattgcaccactgcactccagcctaggcgacagagtgagactccatctcaaaaaaaaaaaaagaagtttattatatgaattaacttagttttactcacaccaatactcagaagtagattattacctcatttattgatgaggagcccaatgtacttgtagtgtagatcaacttattgaaagcacaagctaataagtagacaattagtaattagaagtcagatggtctgagctctcctactgtctacattacatgagctcttattaactggggactcgaaaatcaaagacatgaaataatttgtccaagcttacagaaccaccaagtagtaaggctaggatgtagacccagttctgctacctctgaagacagtgttttttccacagcaaaacacaaactcagatattgtggatgcgagaaattagaagtagatattcctgccctgtggcccttgcttcttacttttacttcttggcgattggaagttgtggtccaagccacagttgcagaccatacttcctcaaccataattgcatttcttcaggaaagtttgagggagaaaaaggtaaagaaaaatttagaaacaacttcagaataaagagattttctcttgggttacagagattgtcatatgacaaattataagcagacacttgagaaaactgaaggcccatgcctgcccaaattaccctttgaccccttggtcaagctgcaactttggttaaagggagtgtttatgtgttatagtgttcatttactcttctggtctaacccattggctccgtcttcatcctgcagtgacctcagtgcctcagaaacatacatatgtttgtctagtttaagtttgtgtgaaattctaactagcgtcaagaactgagggccctaaactatgctaggaatagtgctgtggtgctgtgataggtacacaagaaatgagaagaaactgcagattctctgcatctccctttgccgggtctgacaacaaagtttccccaaattttaccaatgcaagccatttctccatatgctaactactttaaaatcatttggggcttcacattgtctttctcatctgtaaaaagaatggaagaactcattcctacagaactccctatgtcttccctgatgggctagagttcctctttctcaaaaattagccattattgtatttccttctaagccaaagctcagaggtcttgtattgcccagtgacatgcacactggtcaaaagtaggctaagtagaagggtactttcacaggaacagagagcaaaagaggtgggtgaatgagagggtaagtgagaaaagacaaatgagaagttacaacatgatggcttgttgtctaaatatctcctagggaattattgtgagaggtctgaatagtgttgtaaaataagctgaatctgctgcctaacattaacagtcaagaaatacctccgaataactgtacctccaattattctttaaggtagcatgcaactgtaatagttgcatgtatatatttatcataatactgtaacagaaaacacttactgaatatatactgtgtccctagttctttacacaataaactaatctcatcctcataattctattagctaatacatattatcatcctatatttcagagacttcaagaagttaagcaacttgctcaagatcatctaagaagtaggtggtatttctgggctcatttggcccctcctaatctctcatggcaacatggctgcctaaagtgttgattgccttaattcatcagggatgggctcatactcactgcagaccttaactggcatcctcttttcttatgtgatctgcctgaccctagtagaacttatgaaatttctgatgagaaaggagagaggagaaaggcagagctgactgtgatgagtgatgaaggtgccttctcatctgggtaccagtggggcctctaagactaagtcactctgtctcactgtgtcttagccagttccttacagcttgccctgatgggagatagagaatgggtatcctccaacaaaaaaataaattttcatttctcaaggtccaacttatgttttcttaatttttaaaaaaatcttgaccattctccactctctaaaataatccacagtgagagaaacattcttttcccccatcccataaatacctctattaaatatggaaaatctgggcatggtgtctcacacctgtaatcccagcactttgggaggctgaggtgggtggactgcttggagctcaggagttcaagaccatcttggacaacatggtgataccctgcctctacaaaaagtacaaaaattagcctggcatggtggtgtgcacctgtaatcccagctattagggtggctgaggcaggagaattgcttgaacccgggaggcggaggttgcagtgagctgagatcgtgccactgcactccagcctgggggacagagcacattataattaactgttattttttacttggactcttgtggggaataagatacatgttttattcttatttatgattcaagcactgaaaatagtgtttagcatccagcaggtgcttcaaaaccatttgctgaatgattactatactttttacaagctcagctccctctatcccttccagcatcctcatctctgattaaataagcttcagtttttccttagttcctgttacatttctgtgtgtctccattagtgacctcccatagtccaagcatgagcagttctggccaggcccctgtcggggtcagtgccccacccccgccttctggttctgtgtaaccttctaagcaaaccttctggctcaagcacagcaatgctgagtcatgatgagtcatgctgaggcttagggtgtgtgcccagatgttctcagcctagagtgatgactcctatctgggtccccagcaggatgcttacagggcagatggcaaaaaaaaggagaagctgaccacctgactaaaactccacctcaaacggcatcataaagaaaatggatgcctgagacagaatgtgacatattctagaatatattatttcctgaatatatatatatatatatatacacatatacgtatatatatatatatatatatatttgttgttatcaattgccatagaatgattagttattgtgaatcaaatatttatcttgcaggtggcctctatacctagaagcggcagaatcaggctttattaatacatgtgtatagatttttaggatctatacacatgtattaatatgaaacaaggatatggaagaggaaggcatgaaaacaggaaaagaaaacaaaccttgtttgccattttaaggcacccctggacagctaggtggcaaaaggcctgtgctgttagaggacacatgctcacatacggggtcagatctgacttggggtgctactgggaagctctcatcttaaggatacatctcaggccagtcttggtgcattaggaagatgtaggcaactctgatcctgagaggaaagaaacattcctccaggagagctaaaagggttcacctgtgtgggtaactgtgaaggactacaagaggatgaaaaacaatgacagacagacataatgcttgtgggagaaaaaacaggaggtcaaggggatagagaaggcttccagaagaatggctttgaagctggcttctgtaggagttcacagtggcaaagatgtttcagaaatgtgacatgacttaaggaactatacaaaaaggaacaaatttaaggagaggcagataaattagttcaacagacatgcaaggaattttcagatgaatgttatgtctccactgagcttcttgaggttagcagctgtgagggttttgcaggcccaggacccattacaggacctcacgtatacttgacactgttttttgtattcatttgtgaatgaatgacctcttgtcagtctactcggtttcgctgtgaatgaatgatgtcttgtcagcctacttggtttcgctaagagcacagagagaagatttagtgatgctatgtaaaaacttcctttttggttcaagtgtatgtttgtgatagaaatgaagacaggctacatgatgcatatctaacataaacacaaacattaagaaaggaaatcaacctgaagagtatttatacagataacaaaatacagagagtgagttaaatgtgtaataactgtggcacaggctggaatatgagccatttaaatcacaaattaattagaaaaaaaacagtggggaaaaaattccatggatgggtctagaaagactagcattgttttaggttgagtggcagtgtttaaagggtgatatcagactaaacttgaaatatgtggctaaataactagaatactctttattttttcgtatcatgaatagcagatatagcttgatggccccatgcttggtttaacatccttgctgttcctgacatgaaatccttaatttttgacaaaggggctattcattttcattttatattgggcctagaaattatgtagatggtcctgaggaaaagtttatagcttgtctatttctctctctaacatagttgtcagcacaatgcctaggctataggaagtactcaaagcttgttaaattgaattctatccttcttattcaattctacacatggaggaaaaactcatcagggatggaggcacgcctctaaggaaggcaggtgtggctctgcagtgtgattgggtacttgcaggacgaagggtggggtgggagtggctaaccttccattcctagtgcagaggtcacagcctaaacatcaaattccttgaggtgcggtggctcactcctgtaatcacagcagtttgggacgccaaggtgggcagatcacttgaggtcaggagttggacaccagcccagccaacatagtgaaacctggtctctgcttaaaaatataaaaattagctggacgtggtgacgggagcctgtaatccaactacttgggaggctgaggcaggagaatcgcttgaaccggggaggtggagtttgcactgagcagagatcatgccattgcactccagcctccagagcgagactctgtctaaagaaaaacgaaaacaaacaaacaaacaaacaaacaaaacccatcaaattccctgaccgaacagaattctgtctgattgttctctgacttatctaccattttccctccttaaagaaactgtggaacttccttcagctagaggggcctggctcagaagcctctggtcagcatccaagaaatacttgatgtcactttggctaaaggtatgatgtgtagacaagctccagagatggtttctcatttccatatccacccacccagctttccaattttaaagccaattctgaggtagagactgtgatgaacaaacaccttgacaaaattcaacccaaagactcactttgcctagcttcaaaatccttactctgacatatactcacagccagaaattagcatgcactagagtgtgcatgagtgcaacacacacacacaccaattccatattctctgtcagaaaatcctgttggtttttcgtgaaaggatgttttcagaggctgaccccttgccttcacctccaatgctaccactctggtctaagtcactgtcaccaccacctaaattatagctgttgactcataacaatcttcctgcttctaccactgccccactacaatttcttcccaatatactatccaaattagtcttttcaaaatgtaagtcatatatggtcacctctttgttcaaagtcttctgatagtttcctatatcatttataataaaaccaaatccttacaattctctacaatagttgttcatgcatatattatgtttattacagatacgcatatatatagctctcatataaataaatatatatatttatgtgtatgtgtgtagagtgttttttcttacaactctatgatgtaggtattattagtgtcccaaattttataatttaggacttctatgatctcatcttttattctccccttcaccgaatctcatcctacattggccttattgatattccttgaaaattctaagcatcttacatctttagggtatttacatttgccattccctatgccctaaatatttaatcatagtttcatataaatgggttcctcatcatctatgggtactctctcaggtgttaactttatagtgaggactttcctgccatactacttaaagtagcgataccctttcaccctgtcctaatcacactctggccttcatttcagttttttttttttctccatagcacctaatctcattggtatataacatgtttcatttgcttatttaatgtcaagctctttccactatcaagtccatgaaaacaggaactttattcctctattctgtttttgtgctgtattcttagcaattttacaattttgaatgaaatgaatgagcagtcaaacacatatacaactataattaaaaggatgtatgctgacacatccactgctatgcacacacaaagaaatcagtggagtagagctggaagcgctaagcctgcatagagctagttagccctccgcaggcagagccttgatgggattactgagttctagaattggactcatttgttttgtaggctgagatttgctcttgaaaacttgttctgaccaaaataaaaggctcaaaagatgaatatcgaaaccagggtgttttttacactggaatttataactagagcactcatgtttatgtaagcaattaattgtttcatcagtcaggtaaaagtaaagaaaaactgtgccaaggcaggtagcctaatgcaatatgccactaaagtaaacattattccataggtgtcagatatggcttattcatccatcttcatgggaaggatggccttggcctggacatcagtgttatgtgaggttcaaaacacctctaggctataaggcaacagagctccttttttttttttctgtgctttcctggctgtccaaatctctaatgataagcatacttctattcaatgagaatattctgtaagattatagttaagaattgtgggagccattccgtctcttatagttaaatttgagcttcttttatgatcactgtttttttaatatgctttaagttctggggtacatgtgccatggtggtttgctgcacccatcaacccgtcatctacattaggtatttctcctaatgctatccttcccctagccccccacccccaacaggccccagtgtgtgatgttcccctccctgtgtccatggatcactggttttttttttttttttttttttttttttaaagtctcagttaaatttttggaatgtaatttattttcctggtatcctaggacctgcaagttatctggtcactttagccctcacgttttgatgataatcacatatttgtaaacacaacacacacacacacacacacacacatatatatatataaaacatatatatacataaacacacataacatatttatcgggcatttctgagcaactaactcatgcaggactctcaaacactaacctatagccttttctatgtatctacttgtgtagaaaccaagcgtggggactgagaaggcaatagcaggagcattctgactctcactgcctttggctaggtccctccctcatcacagctcagcatagtccgagctcttatctatatccacacacagtttctgacgctgcccagctatcaccatcccaagtctaaagaaaaaaataatgggtttgcccatctctgttgattagaaaacaaaacaaaataaaataagcccctaagctcccagaaaacatgactaaaccagcaagaagaagaaaatacaataggtatatgaggagactggtgacactagtgtctgaatgaggcttgagtacagaaaagaggctctagcagcatagtggtttagaggagatgtttctttccttcacagatgccttagcctcaataagcttgcggttgtggaagtttactttcagaacaaactcctgtggggctagaattattgatggctaaaagaagcccgggggagggaaaaatcattcagcatcctcacccttagtgacacaaaacagagggggcctggttttccatatttcctcatgatggatgatctcgttaatgaaggtggtctgacgagatcattgcttcttccatttaagccttgctcacttgccaatcctcagttttaaccttctccagagaaatacacattttttattcaggaaacatactatgttatagtttcaatactaaataatcaaagtactgaagatagcatgcataggcaagaaaaagtccttagctttatgttgctgttgtttcagaatttaaaaaagatcaccaagtcaaggacttctcagttctagcactagaggtggaatcttagcatataatcagaggtttttcaaaatttctagacatgagattcaaagccctgcacttaaaatagtctcatttgaattaactctttatataaattgaaagcacattctgaactacttcagagtattgttttatttctatgttcttagttcataaatacattaggcaatgcaatttaattaaaaaaacccaagaatttcttagaattttaatcatgaaaataaatgaaggcatctttacttactcaaggtcccaaaaggtcaaagaaaccaggaaagtaaagctatatttcagcggaaaatgggatatttatgagttttctaagttgacagactcaagttttaaccttcagtgcccatgatgtaggaaagtgtggcataactggctgattctggctttctactcctttttcccattaaagatccctcctgcttaattaacattcacaagtaactctggttgtactttaggcacagtggctcccgaggtcagtcacacaataggatgtctgtgctccaagttgccagagagagagattactcttgagaatgagcctcagccctggctcaaactcacctgcaaacttcgtgagagatgaggcagaggtacactacgaaagcaacagttagaagctaaatgatgagaacacatggactcatagagggaaacaacgcatactggggcctatcagagggtggagggtgagagaaggagaggatcaggaaaaatcactaatggatgctaagcgtaatacctgagtgatgagatcatctatacaacaaacccccttgacattcatttatctatgtaacaaacctgcacatcctgtacacgtacccctgaacttaaaataaaagttgaaaacaagaaagcaacagtttgaacacttgttatggtctattctctcattctttacaattacactagaaaatagccacaggctcctgcaaggcagccacagaatttatgacttgtgatatccaagtcattcctggataatgcaaaatctaacacaaaatctagtagaatcatttgcttacatctatttttgttctgagaatatagatttagatacataatggaagcagaataatttaaaatctggctaatttagaatcctaagcagctcttttcctatcagtggtttacaagccttgtttatatttttcctattttaaaaataaaaataaagtaagttatttgtggtaaagaatattcattaaagtatttatttcttagataataccatgaaaaacattcagtgaagtgaagggcctactttacccaacaagaatctaatttatataatttttcatactaatagcatctaagaacagtacaatatttgactcttcaggttaaacatatgtcataaattagccagaaagatttaagaaaatattggatgtttccttgtttaaattaggcatcttacagtttttagaatcctgcatagaacttaagaaattacaaatgctaaagcaaacccaaacaggcaggaattaatcttcatcgaatttgggtgtttctttctaaaagtcctttatacttaaatgtcttaagacatacatagattttattttactaattttaattatacagacaataaatgaatattcttactgattactttttctgactgtctaatctttctgatctatcctggatggccataacacttatctctctgaactttgggcttttaatataggaaagaaaagcaataatccatttttcatggtatctcatatgataaacaaataaaatgcttaaaaatgagcaggtgaagcaatttatcttgaaccaacaagcatcgaagcaataatgagactgcccgcagcctacctgacttctgagtcaggatttataagccttgttactgagacacaaacctgggcctttcaatgctataacctttcttgaagctcctccctaccacctttagccataaggaaacatggaatgggtcagatccctggatgcaagccaggtctggaaccataggcagtaaggagagaagaaaatgtgggctctgcaactggctccgagggagcaggagagaatcaaccccatactctgaatctaagagaagactggtgtccatactctgaatgggaagaatgatgggattacccatagggcttgttttagggagaaacctgttctccaaactcttggccttgagatacctggtccttattccttggactttggcaatgtctgaccctcacattcaagttctgaggaagggccactgccttcatactgtggatctgtagcaaattccccctgaaaacccagagctgtatcttaattgtttaaaaaaattatattatctcaaggactgttcttctctgagtagccaagctcagcttggttcaagctacaagcagctgagctgctttttgtctagtcattgttcttttatttcagtggatcaaatacgttctttccaaacctaggatcttgtcttcctaggctatatattttgtcccaggaagtcttaatctggggtccacagaacactagggggctggtgaagtttatagaaaaaaaatctgtatttttacttacatgtaactgaaatttagcattttcttctactttgaatgcaaaggacaaactagaatgacatcatcagtacctattgcatagttataaagagaaaccacagatattttcatactacaccataggtattgcagatctttttgtttttgtttttgtttgagatggagtttcgctcttattgcccaggctggagtgcagtggcatgatttcggctcactgcaacctccccttcctgcattcaagcaattctcctgccttggcctccagagtagctggggattacaggcacctgccaccatgccagtctaatttttgtatttttagtagagatggggtttcgccatgttggccaggctggtcttgaactcctgacctcagatgatctgcccgccttggcctcctgaagtgctgggattataggtgtgagccaccacgcctggcccattgcagatatttttaattcacatttatctgcatcactacttggatcttaaggtagctgtagacccaatcctagatctaatgctttcataaagaagcaaatataataaatactataccacaaatgtaatgtttgatgtctgataatgatatttcagtgtaattaaacttagcactcctatgtatattatttgatgcaataaaaacatattttttttagcacttacagtctgccaaactggcctgtgacacaaaaaaagtttaggaattcctggttttgtctgtgttagccaatggttagaatatatgctcagaaagataccattggttaatagctgaaagaaaatggagtagaaattcagtggcctggaataataacaatttgggcagtcattaagtcaggtgaagacttctggaatcatgggagaaaagcaagggagacattcttacttgccacaagtgtttttttttttttttttttatcacaaacataagaaaatataataaataacaaagtcaggttatagaagagagaaacgctcttagtaaacttggaatatggaatccccaaaggcacttgacttgggagacaggagccatactgctaagtgaaaaagacgaagaacctctagggcctgaacataggaaattgtaggaacagaaattcctagatctggtggggcaaggggagccataggagaaagaaatggtagaaatggatggagacggaggcagaggtgggcagatcatgaggtcaagagatcgagaccatcctggcaaacatggtgaaatcccgtctctactaaaaataaaaaaattagctgggcatggtggcatgcgcctgtagtcccagctgctcgggaggctgaggcaggagaatcgtttgaacccaggaggcgaaggttgcagtgagctgagatagtgccattgcactccagtctggcaacagagtgagactccgtctcaaaaaaaaaaaaaagaaagaaagaaaagaaaaagaaaaaagaaaaaataaatggatgtagaacaagccagaaggaggaactgggctggggcaatgagattatggtgatgtaagggacttttatagaattaacaatgctggaatttgtggaactctgcttctattattcccccaatcattacttctgtcacattgatagttaaataatttctgtgaatttattccttgattctaaaatatgaggataatgacaatggtattataagggcagattaagtgatatagcataagcaatattcttcaggcacatggatcgaattgaatacactgtaaatcccaacttccagtttcagctctaccaagtaaagagctagcaagtcatcaaaatggggacatacagaaaaaaaaaaggacactagaggaataatataccctgactcctagcctgattaatatatcgattcacttttttctctgtttgatgacaaattctggctttaaataattttaggattttaggcttctcagctcccttcccagtgagaagtataagcaggacagacaggcaagcaagaagagagccccaggcaatactcacaaagtagccagtgtcccctgtggtcatagagaaatgaaaagagagaggattccctggaagcactggatgtaatcttttctgtctgtcctctctagggaatcaccccaaggtactgtactttgggattaaggctttagtcccactgtggactacttgctattctgttcagtttctagaaggaactatgtacggtttttgtctccctagagaaactaaggtacagaagttttgtttacaatgcactccttaagagagctagaactgggtgagattctgttttaacagctttattttcttttccttggccctgtttttgtcaactgtcaccacctttaaggcaaatgttaaatgtgctttggctgaaactttttttcctattttgagatttgctcctttatatgaggctttcttggaaaaggagaatgggagagatggatatcattttggaagatgatgaagagggtaaaaaaggggacaaatggaaatttgtgttgcagatagatgaggagccaacaaaaaagagcctcaggatccagcacacattatcacaaacttagtgtccatccatcactgctgaccctctccggacctgactccacccctgaggacacaggtcagccttgaccaatgacttttaagtaccatggagaacagggggccagaacttcggcagtaaagaataaaaggccagacagagaggcagcagcacatatctgcttccgacacagctgcaatcactagcaagctctcaggcctggcatcatggtgcattttactgctgaggagaaggctgccgtcactagcctgtggagcaagatgaatgtggaagaggctggaggtgaagccttgggcaggtaagcattggttctcaatgcatgggaatgaagggtgaatattaccctagcaagttgattgggaaagtcctcaagattttttgcatctctaattttgtatctgatatggtgtcatttcatagactcctcgttgtttacccctggacccagagattttttgacagctttggaaacctgtcgtctccctctgccatcctgggcaaccccaaggtcaaggcccatggcaagaaggtgctgacttcctttggagatgctattaaaaacatggacaacctcaagcccgcctttgctaagctgagtgagctgcactgtgacaagctgcatgtggatcctgagaacttcaaggtgagttcaggtgctggtgatgtgattttttggctttatattttgacattaattgaagctcataatcttattggaaagaccaacaaagatctcagaaatcatgggtcgagcttgatgttagaacagcagacttctagtgagcataaccaaaacttacatgattcagaactagtgacagtaaaggactactaacagcctgaattggcttaacttttcaggaaatcttgccagaacttgatgtgtttatcccagagaattgtattatagaattgtagacttgtgaaagaagaatgaaatttggcttttggtagatgaaagtccatttcaaggaaatagaaatgccttattttatgtgggtcatgataattgaggtttagaagagatttttgcaaaaaaaataaaagatttgctcaaagaaaaataagacacattttctaaaatatgttaaatttcccatcagtattgtgaccaagtgaaggcttgtttccgaatttgttggggattttaaactcccgctgagaactcttgcagcactcacattctacatttacaaaaattagacaattgcttaaagaaaaacagggagagagggaacccaataatactggtaaaatggggaagggggtgagggtgtaggtaggtagaatgttgaatgtagggctcatagaataaaattgaacctaagctcatctgaattttttgggtgggcacaaaccttggaacagtttgaggtcagggttgtctaggaatgtaggtataaagccgtttttgtttgtttgtttgttttttcatcaagttgttttcggaaacttctactcaacatgcctgtgtgttattttgtcttttgcctaacagctcctgggtaacgtgatggtgattattctggctactcactttggcaaggagttcacccctgaagtgcaggctgcctggcagaagctggtgtctgctgtcgccattgccctggcccataagtaccactgagttctcttccagtttgcaggtcttcctgtgaccctgacaccctccttctgcacatggggactgggcttggccttgagagaaagccttctgtttaataaagtacattttcttcagtaatcaaaaattgcaattttatcttctccatcttttactcttgtgttaaaaggaaaaagtgttcatgggctgagggatggagagaaacataggaagaaccaagagcttccttaagaaatgtatgggggcttgtaaaattaatgtggatgttatgggagaattcccaagattcccaaggaggatgatatgatggagaaaaatctttatcggggtgggaaaatggttaattaagtggcagagactcctaggcagtttttactgcaccggggaaagaaggagctgttgtggtacctgagaaagcagatttgtggtacatgtcacttttcattaaaaacaaaaacaaaacaaaacaaaacttcatagatatccaagatataggctgagaattactattttaatttactcttatttacattttgaagtagctagcttgtcacatgttttatgaaattgatttggagataagatgagtgtgtatcaacaatagcctgctctttccatgaaggattccattatttcatgggttagctgaagctaagacacatgatatcattgtgcattatcttctgatacaatgtaacatgcactaaaataaagttagagttaggacctgagtgggaaagtttttggagagtgtgatgaagactttccgtgggagatagaatactaataaaggcttaaattctaaaaccagcaagctagggcttcgtgacttgcatgaaactggctctctggaagtagaagggagagtaagacatacgtagaggactaggaaagaccagatagtacagggcctggctacaaaaatacaagcttttactatgctattgcaatactaaacgataagcattaggatgttaagtgactcaggaaataagattttgggaaaaagtaatctgcttatgtgcacaaaatggattcaagtttgcagataaaataaaatatggatgatgattcaaggggacagatacaatggttcaaacccaagaggagcagtgagtctgtggaattttgaaggatggacaaaggtggggtgagaaagacatagtattcgacctgactgtgggagatgagaaggaagaaggaggtgataaatgactgaaagctcccagactggtgaagataacaggaggaaaccatgcacttgaccctggtgactctcatgtgtgaagggtagagggatattaacagatttactttttaggaagtgctagattggtcagggagttttgaccttcaggtcttgtgtctttcatatcaaggaacctttgcattttccaagttagagtgccatattttggcaaatataactttattagtaattttatagtgctctcacattgatcagactttttcctgtgaattacttttgaatttggctgtatatatccagaatatgggagagagacaaataattattgtagttgcaggctatcaacaatactggtctctctgagccttataacctttcaatatgccccataaacagagtaaacagggattattcatggcactaaatattttcacctaggtcagtcaacaaatggaggcaatgtgcattttttgatacatatttttatatatttatggggcatgtgatacttacatgcctagaacatgtgactgattaagtctagatatttaggatatccattactttgagcatttatcatttctatgtattgagaaaatttcaaatcctcatttctgaccattttgaaatatataataaatagtaattaactatagtcaccctactcaaatatcaacattataaactaactaatccttctttccacttttttaccaaccaacatctcttaaatcccctgccatacacatcacacatttttcagctctgataactatcattctactctcataccaccatgagaccacttttttagctccacagatgaataaaaacatgtgatatttgactttctgtatctggcttattttattatctatctctttggcataccaagagtttgtttttgttctgcttcagggctttcaattaacataatgacctctggttccatccatgttgctacaaatgacaagatttcattctttttcatggcaaaatagtactgtgcaaaaaatacaattttttaatccgttcatctgttgatagacacttaggttgatcccaaaccttaactattgtgaataggtgcttcaataaacatgagtgtaatgtgtccattggatatactgatttcctttcttttggataaataaccactagtgagattgctggattgtatgatagttctgtttttagtttattgagaaatcttcatactgttttccataatggttgtactattttacattcccaccaacagtgtgtaagaaagagttcccttttctccatatcctcacaaggatctgttattttttgtcttttttgttaatagcattttaactagagtaagtagatatctcattgtagttttgatttgcatttccctgatcattagtgatgttgagattttttcatatgtttgttggtcatttgtatatctttttctgagattgtctgttcatgtccttatcctacttttattgggattgttgttattttcttgataatcattgtgtcattttagagcctggatattattcttttgtcagatgtatagattgtgaagattttctcctctgtgggttgtctgtttattctgcagactcttccttttgccatgcaaaagctctttagtttaatttagtcccagatattttctttgtttttatgtgtttgcatttgtgttcttgtcatgaaatcctttcctaagccaatgtgtagaagggtttttccgatgttattttctagaattgttacagtttcaggcttagatttaagtccttgatccatcttaagttgatttttgtataaggtgagagatgaagatccagtttcattctcctacatgtagcttgccagctatcccgactcatttgttgaatagggtgccctttcccatttatgtttttgtttgctttgtcaaagatcagttcggatgtaagtatttgagtttatttctgggttctctattctgttccattggtccgatgtgcctatttgtacaccagcatcatgctgtgtttttggtgactatggccttattgtatagtttgaaatgaggtaatgtaatgccattcagatttgttcttttttttagacttgcttgtttattgggctcttttttggttccataagaattttaggattgttttttctagttctgtgaaggctaatggtggtatttatgggaattgcaatgcaatttgtaggttgcttctggcattatggccattttcacaatattgattctacccatctatgagaatggcatgtgtttccatttgtttgtgtcttatatgattactatcagccgtgttttgtagttttccttgtagatgtctttcacctccttggttaggtatatattcctaagtttttgttttgttttgttttgttttttgcagctattgtaaaaggggttgagttattgattttattctcatcttggtcattgctggtatgtaagaaagcaactcattggtgtacgttaattttgtatccagaaactttgctgaattattttatcagttctagggggttttggaggagtctttagagttttctacatacacaatcatatcatcagcaaacagtgacagtttgactttctctttaacaatttggatgtgctttacttgtttctcttgtctgattgctcttgctaggacttccagtaatatgttaaagagaagtggtgagagtgggtatccttgtctcattccagttttcagacagaatgcttttaactttttcccattcaatataatgttggctgtgtgtttaccatagctggcttttattacattgaggtatgtcctttgtaaaccgattttgctgagttttagtcataaagtgatgttgaattttgttgaatgcagtttctgtggctattgagataatcacatgatttttgtttccaattctctttatgttgtgtatcacacttattgacttgcgtatgttaaaccatccgtgcatccctcgcatgaaaccacttgatcatgggttttgatatgccgtgtgggatgctattagctatattttgtcaaggatgttggcatctatgttcatcagggatattgatctgtagtgttttttttttttggttatgttctttcccagttttggtattaaggtgatactggcttcatagaatgatttagggaggattctctctttctctatcttgtagaatactgtcaataggattggtatcaattcttctttgaatgtctggtagaattcgaacgtctcctttaggttttctagtttattcatgtaaaggtgttcatagtaaccttgaataatcttttgtatttctgtggtatcagtaatagtatctcctgttttgtttctaactgagtttatttgcacttctctcctcttttcttggttaatcttgctaatggtctatcagttttatttatcttttcaaagaaccagctttttatttcatttagcttttgtatttttttgcagttgttttaatttcatttagttctcctcttatcttagttattccctttcttttgctgggttttggttctgtttgtttttgtttctctagtttcttgtggtgtgaccttatattgtctgtcctctttcagactctttgacatcgacatttagggctgtgaactttccttttagcaccatctttgctgtatcctagaggttttgataggtgtgtcactattgtcggtcagttcaagtaattttgttgttcttattatactttaagttctgggatacatgtgcagaatgtgcaggtttgttacataggtatagatgtgccatggtggtttgctgctcccatcaacctgtcatctacattaggtatttcttttaatgttatccctctcctaaccccctcaccccccgacaggccctggtgtgtgatgttcccctccctgtgtccatgtgttctcattgttcaactcccacttatgagtgagaacgtgtggtgtttggtttctctgttcctgtgttagtttgctcagaatgatgtttccaccttcaccatgtccctgcaaagacatgaactcatcattttatggctgcatatattccatggtgtatatgtgccacattttctttatccattatatcgctgatggccatttgggttggttccaagtctttggtattgtgaatagtgccgcaataaacatacgtgtgcacatgtctttatagtagaatgatttctaattctttgggtatatacccagtaatgggattgctgggtcaaacagtatttctggttctagatccttgaggaattgccacactgtcttccacaatggttgaactaatttacacacccatcaacagtgtaaaatttttcctattcttccacatcctctccagcaccttttgtttcctgactttttaataattgccattctaactggcatgagatggtatctcattgtggttttgatttgcatttctctaatgaccagtgatgatgagcttcttttcatgtgtttcttggccacataaatgacttctttagagaagcatctgttcatatcctttgtccactttttgatggggtcgttaggttttttcttgtaaatttgttgaagttctttgtagattttggatgttagccctttgtcagatggatagattggcaaaaattttctcccattctgtaggttgcctgttcactctgatgatagtcttttgctgtgcagaagctctttagtttaattagatcccatatgtcaattttggcctttgttgtcattgcttttgatgtttagtcgtggaattttgcccatgcctatgtcctgaatggtattgcctaggttatcttctaggatttttatggttttaggttgcacatttaagtctttaatccaccttgagttaatttttgtataaggtgtaaggaaggggtacagtttcagttttatgcatattgctagccagtttttccagcaccatttattaaatagggaattctttctccattgcttttgtgatgtttgtcaaagatcagatggtcgtagatgtgtggcattatttctgaggcttctgttctgttccactggtctatatatctgttttggtaccagtaccatgctgtttttgttactgtagccttgtagtatagcttgaagtcaggtagcatcatgcctccagctttgttctttttgtttaggattgtcttggctatatgggctcttttttgattccatatgacatttaaagtagttttttctaattctttgaaaaaagtcagtggtagcttgatggggatagcattgaatctataaattactttgggcagtatggccattttaaagatattgattctttctatctatgagcatggaatgtttttccatttgtttgtgtcctctcttatttccttgagcagtgagtggtttgtagctctccttgaagaggttcttcacatcccttataagttgtatttctaggtattttattttattctctttgcagcaattgtgaatgggagttcacccatgatttggctctctgcttgtctattattggtgtataggaatgcttgtgatttttgcacactgattttgtatcttgagactttgctgaagctgtttatcagcttaagattttgggctgagatgacagggtcttctaaatatacaatcatgtcatctgcaaacagagacaatttgacttcctctcttcctatttgaatatgctttatttctttctcttgcctgattgtcctggcgagaacttccaatactatgttgagtaagagtggcgagagggcatccttgtcttgtgccggttttcaaagcaaatgatttttaaatttccgtcttgatttcattgttgacccaatgatcattcaggagcaggttatttaatttccctgtatttgcatggttttgaaggttccttttgtagttgatttccaattttattctactgtggtctgagagagtgcttgatataatttcaatttttaaaaatttattgaggcttgttttgtggcatatcatatggcctatcttggagaaagttccatgtgctgatgaatagaatgtgtattctgcagttgttgggtagaatgtcctgtaaatatctgttaagtccatttgttctttaaatccattgtttctttgtagactgtcttgatgacctgcctagtgcagtcagtggagtattgaagtcccccactattattatgttgctgtctagtagtaattgttttataaatttgggatctccagtattagatgcatatatattaagaattgtaatattctcccattggacaagggcttttatcattatatgatgtccctctttgtcttttttaactgctgtttctttaaagtttgttttgtctgacataagaatagctgctttggctcgcttttggtgtccatttgtgtggaatgtcattttccacccctttaccttaagtttatgtgagtccttatgtgttaggtgagtctcctgaaggcggcagataactggttggtgaattctattcattctgcaattctgtatcttttaagtggagcatttagtccatttacattcaacatcagtattgaggtgtgaggtgactattccattcttcgtggtatttgttgcctgtgtatctttttatctgtatttttgttgtatatgtcctatgggatttatgctttaaagaggttctgttttgatgtgcttccagggtttatttcaagatttagagctccttttatcattcttgtagtgttggcttggtagtgccgaattctctcagcatttgtttttctgaaaaacactgtgtattttcttcatttgtgaagcttagtttcactggatataaaattcttggctgataattgttttgtttaagaaggctgaagatagggccatattcacttctagcttttacggtttctgctgagaaatctgctgttaatctgataggttttctttcataggttacctggtagtttcacctcacagctcttaagattctctttgtctttagataactttggatactctgatgacaatgtacctaggcaatgatatttttgcaatgaatttcccaggtgtttattgagcttctttgtatttggatatctaggtctctagcaaggagggggaagttttccttgattatttccatggacaagttttccaaacttttagatttctcttctttctcaggaatgctgattattcttaggtttgattgtttaacataatcccagatttcttggaggctttgttcatattttcttattcttttttctttgtctttgttggattgggtaattcaaaaactttgtcttcaagctctgaatttcttctgcttggattctattgctgagactttctagagcattttgcatttctataagtgcatccattcatccattgtttcctgaagttttgaatgttttttatttatgctatctctttaactgaagatttctcccctcatttcttgtatcatatttttggtttttttaaaattggacttcaccttcctcggatgcctccttgattagcttaataactgaccttctgaattatttttcaggtaaatcagggatttcttcttggtttggatgcattgctggtgagctagtatgattttttggggggtgttaaagaaccttgtttttcatattaccagagttagttttctggttccttctcacttgggtaggctctgtcagagggaaagtctaggcctcaaggctgagacttttgtcccagcaggtgttcccttgatgtagcacagtcccccttttcctaggacgtggggcttcctgagagccgaactgtagtgattgttatctctcttctggatctagccacccatcaggtctaccagactccaggctggtactggggtttgtctgcacagagtcttgtgacgtgaaccatctgtgggtctctcagccatagatacaaccacctgctccaatggaggtggtagaggatgaaatgaactctgtgagggtccttacttttggttgttcaatgcactatctttttgtgctggttggcctcctgccaggaggtggcactttctagaaagcatcagcagaggcagtcaggtggtggtggctgggggggctggggcactagaactcccaagaatatatgccctttgtcttcagctactagggtgagtaaggaaggaccatcaggtgggggcaggactagtcgtgtctgagctcagagtctccttgggcaggtctttctgtggctactgtgggaggatgggggtgtagtttccaggtcaatggatttatgttcctaggacaattatggctgcctctgctgtgtcatgcaggtcatcaggaaagtgggggaaagcaagcagtcacgtgacttgcccagctcccatgcaactcaaaaggttggtctcacttccagcgtgcaccctcccccgcaacagctccgaatctgtttccatgcagtcagtgagcaaggctgagaacttgcccaggctaccagctgcgaaaccaagtagggctgtcctacttccctgccagtggagtctgcacaccaaattcatgtccccccaccaacccccccactgcccagcccctagatctggccaggtggagattttctttttcctgtctcttttcccagttcctctggcagccctcccaaatgacccctgtgaggcaaggcagaaatggcttcctaggggacccagagagcccacagggcttttcccgctgcttcctctacccctgtattttgcttggccctctaaattgactcagctccaggtaaggtcagaatcttctcctgtggtctagatcttcaggttcccagtgaggatgtgtgtttgggggtagacggtcccccttttccacttccacagtttgggcactcacaatatttggggtgtttcccgggtcctacatgagcaatctgcttctttcagagggtgtgtgcgttctctcagctttcttgaatttatttctgcaggtggttctgcaaaaaaaattcctgatgggagacttcacatgctgctctgtgcatccgagtgggagctgcaatgtacttctgctgccacccatctgccatcaccctctaatttgtcggtaatatgcatttttaatcaatctttttttctctctctctcttttcttctcccccaaaactatactgccctttgatatcaaggaatcaaggccgtgatgttgaggggtgggcagtggatacactctttaccccttagggagcatatctagatttagatattgccaattcaagataacttaattgaaagcaaattcataatgaatacacacacacacacacacatctgcatgacaagatttttaatagttgaaagaataactaataattgtccacaggcaataagggctttttaagcaaaacagttgtgataaaacaggtcattcttagaatagtaatccagccaatagtacaggttgcttagagattatgacattaccagagttaaaattcaataatggcttctcactccctaccactgaggacaagtttatgtccttaggtttatgcttccctgaaacaataccacctgctattctccactttacatatcaacggcactggttctttatctaactctctggcacagcaggagtttgttttcttctgcttcagagctttgaatttactatttcagcttctaaactttatttgcaatgccttcccatggcagactccttctgtcattttgcctctgttcgaaaactttttccttaatttcattcttagttaataatatctgaaattattttgttgtttaacttaattattaattttatgtatgttctacctagatataatcttctagaggattgttttattctctgacttatttaacttaaatgcccactacctttaaaaattatgacatttatttaacagatatttgctgaacaaatgtttgaaaatacatgggaaagaatgcttgaaaacacttgaaattgcttgtgtaaagaaacagttttatcagttaggatttaatcaatgtcagaagcaatgatataggaaaaatcgaggaataagacagttatggataaggagaaatcaacaaactcttaaaagatattgcctcaaaagcataagaggaaataagggtttatacatgacttttagaacactgcctgggtttttggataaatggggaagttgttggaaaacaggagggatcctagatattccttagtctgaggaggagcaattaagattcacttgtttagaggctgggagtggtggctcacgcctgtaatcccagaattttgggaggccaaggcaggcagatcacctgaggtcaagagttcaagaccaacctggccaacatggtgaaatcccatctctacaaaaatacaaaaattagacaggcatgatggcaagtgcctgtaatcccagctacttgggaggctgaggaaggagaattgcttgaacctggaaggcaggagttgcagtgagccgagatcataccactgcactccagcctgggtgacagaacaagactctgtctcaaaaaaaaaaaagagagattcaaaagattcacttgtttaggccttagcgggcttagacaccagtctctgacacattctt

SEQ ID NO: 250 - protein, 147 aa, Homo sapiens; identical to SEQ ID NO: 211

SEQ ID NO: 251 - protein, 147 aa, Homo sapiens; identical to SEQ ID NO: 211

SEQ ID NO: 252 - protein, 1368 aa, Streptococcus pyogenes M1 GAS [sequence omitted]

SEQ ID NO: 253 - protein, 1388 aa, Streptococcus thermophilus
MTKPYSIGLDIGTNSVGWAVTTDNYKVPSKKMKVLGNTSKKYIKKNLLGVLLFDSGITAEGRRLKRTARRRYTRRRNRILYLQEIFSTEMATLDDAFFQRLDDSFLVPDDKRDSKYPIFGNLVEEKAYHDEFPTIYHLRKYLADSTKKADLRLVYLALAHMIKYRGHFLIEGEFNSKNNDIQKNFQDFLDTYNAIFESDLSLENSKQLEEIVKDKISKLEKKDRILKLFPGEKNSGIFSEFLKLIVGNQADFRKCFNLDEKASLHFSKESYDEDLETLLGYIGDDYSDVFLKAKKLYDAILLSGFLTVTDNETEAPLSSAMIKRYNEHKEDLALLKEYIRNISLKTYNEVFKDDTKNGYAGYIDGKTNQEDFYVYLKKLLAEFEGADYFLEKIDREDFLRKQRTFDNGSIPYQIHLQEMRAILDKQAKFYPFLAKNKERIEKILTFRIPYYVGPLARGNSDFAWSIRKRNEKITPWNFEDVIDKESSAEAFINRMTSFDLYLPEEKVLPKHSLLYETFNVYNELTKVRFIAESMRDYQFLDSKQKKDIVRLYFKDKRKVTDKDIIEYLHAIYGYDGIELKGIEKQFNSSLSTYHDLLNIINDKEFLDDSSNEAIIEEIIHTLTIFEDREMIKQRLSKFENIFDKSVLKKLSRRHYTGWGKLSAKLINGIRDEKSGNTILDYLIDDGISNRNFMQLIHDDALSFKKKIQKAQIIGDEDKGNIKEVVKSLPGSPAIKKGILQSIKIVDELVKVMGGRKPESIVVEMARENQYTNQGKSNSQQRLKRLEKSLKELGSKILKENIPAKLSKIDNNALQNDRLYLYYLQNGKDMYTGDDLDIDRLSNYDIDHIIPQAFLKDNSIDNKVLVSSASNRGKSDDVPSLEVVKKRKTFWYQLLKSKLISQRKFDNLTKAERGGLSPEDKAGFIQRQLVETRQITKHVARLLDEKFNNKKDENNRAVRTVKIITLKSTLVSQFRKDFELYKVREINDFHHAHDAYLNAVVASALLKKYPKLEPEFVYGDYPKYNSFRERKSATEKVYFYSNIMNIFKKSISLADGRVIERPLIEVNEETGESVWNKESDLATVRRVLSYPQVNVVKKVEEQNHGLDRGKPKGLFNANLSSKPKPNSNENLVGAKEYLDPKKYGGYAGISNSFTVLVKGTIEKGAKKKITNVLEFQGISILDRINYRKDKLNFLLEKGYKDIELIIELPKYSLFELSDGSRRMLASILSTNNKRGEIHKGNQIFLSQKFVKLLYHAKRISNTINENHRKYVENHKKEFEELFYYILEFNENYVGAKKNGKLLNSAFQSWQNHSIDELCSSFIGPTGSERKGLFELTSRGSAADFEFLGVKIPRYRDYTPSSLLKDATLIHQSVTGLYETRIDLAKLGEG

SEQ ID NO: 254 - protein, 374 aa, Aeromonas salmonicida subsp Salmonicida A449
MNEQAKQLVAVTRQPALNAGVGLVLAQLAEVEARQIPGSLAEARAHCLAQGAPDILLVEVENPQTLAADLAALAECCPPQMRLVLLGERGDVTLFRWLISVGVDDYYPAPLDPDALRTGLLRLLGVPLVTSLRKGRVICVVGAAGGVGTSTVAANLAMALADQHHRQVALLDLNLHHSRHPILLGSDYAPPGEQWWQATDRLDGTLLAHTAHQLGPRLFLFYDEGQELVLGAEQLVAAVNVMAEHYSTLIIDVPDLRTHGLRALLQEADVVLWLHDFSLGALRLLGQCPQGGQAQRRLLVGNHCRGKEGRVPAQELERVCGQPHAAVLPYDHGVFVRAERAGQPLIQQKSKLARALTLLAGELVGAQVTGRGRR

SEQ ID NO: 255 - protein, 432 aa, Artificial sequence
  Synthetic: Cloning vector DBH-FLPo
MAPKKKRKVMSQFDILCKTPPKVLVRQFVERFERPSGEKIASCAAELTYLCWMITHNGTAIKRATFMSYNTIISNSLSFDIVNKSLQFKYKTQKATILEASLKKLIPAWEFTIIPYNGQKHQSDITDIVSSLQLQFESSEEADKGNSHSKKMLKALLSEGESIWEITEKILNSFEYTSRFTKTKTLYQFLFLATFINCGRFSDIKNVDPKSFKLVQNKYLGVIIQCLVTETKTSVSRHIYFFSARGRIDPLVYLDEFLRNSEPVLKRVNRTGNSSSNKQEYQLLKDNLVRSYNKALKKNAPYPIFAIKNGPKSHIGRHLMTSFLSMKGLTELTNVVGNWSDKRASAVARTTYTHQITAIPDHYFALVSRYYAYDPISKEMIALKDETNPIEEWQHIEQLKGSAEGSIRYPAWNGIISQEVLDYLSSYINRRI

SEQ ID NO: 256 - protein, 323 aa, Human adenovirus 35; identical to SEQ ID NO: 193
